United States Patent Application Publication US 2021/0024907 A1 - sequence listing, part 3

SEQ ID NO: 764 - DNA, 44606 bp, Homo sapiens
tacccctcaggagggctgggccatttggagggcacactgggagacagagcagaaggagctgtagcctgtgaggtggcccaggctcttgacctcagggcaggggatctccttcctttggcaaaggggaagttgtgtcatcctctcgtcacgtcctctgcttcaccttgtcagctcaccagaatgttgcggtcaccttctgtccacgcctcctggcgtgctcctgtccttagtcagagccacccctgttggtatgaaggaggaaaccctgctggtatgtgctggagcctctgagatggaagaactggaggccagcaccttctccatctgtgcccatagaagagaggttgtcaataaggaaaacaaataaggaggtagcacctggtggggtttgttctagatgtctctacagcatcagtgtcactcctggagcccctagacagtatcagtgctcctaggtttggaacaagggcacaaagaggaggttttttgttgttgttgttgttttaagacagggtctcactctgttgcccaggcaggagtgcagtggcccaatctcggctcactgcaacctccatctcctgggttcaagcgattctcctgcctcagcctcccgagtagctgggattataggcacccacaaccatgcccagctaatttttgtatttttagtagagacggggttacaccacgttggccaggctggtttcgaactcctgacctcaagttatccaaccaccttggcctcccaaagtactgggattacaggcgtgagctacggcgcctggccaacaaagaggagtttttagacattgggagacatgaggtccagagtctggtgaactctggccaaggattagccagggtgcactctgggagttcaggtgatatggcccatctttggccctgtgtaatggttaagaatatgcgtgctggagcaaaatggcatgggctcaaatccccagttactagccaaggccaagttatcgaaaatgtgcctcattttccttgtctgcaagataaagataattgtctatccccacagagttgtggtgggtattaagtgagtggatacatgcaaagggctcagaacagtgcctgggcacagcaagcactcagcagatatcagctgtagtgattttaggccgattgcctgattgctcccagtcctcgggctcaagctgcatgcacagttgtccactgggtaaacattcaggttggataggtgagggtggggagaggagaagggctatggaagagtcactcatgacaggcgacttctgtcctgcttagcctcccctctcctgaggctgggctcctatctgtgcctccgtaacacaccaggcccactttctctccctggttcctggggaggcacagagaagagtgtgaccagttgtctggacagctgagcagttgtgttgtagtgcagggcaacgcaagctttagtcacatggcaaatccccagggccgttcctggagtccaccctgtcccacagacgaggactcagccatgattcactgtattcaggtgtggcctgagcttgagtcacctggtgccccttcctccaacacctgagagtcacagcctggaccaggttctcctatgccccctgaacctcttctctctccttttcttcctccttttctccttcctttgttccctatcccttgatctctgattgatcagatcttggctgatctccctagcgacttggacggtttgagcctgacagatggataatagacacagtagcttataatgccacccccacaccctgtcagagacattgccaggaatgactgagaagcaggcaaagaaggagactgcctctgtcaatatggtgacatttctgtaattggagataggtgcctcaaaaaagacctccgcactctggctgatacaggaatttccactattagtaatccatcccagtgcccaaagcctggattgtcccctctgagaatgcaactacacatcaacggcacaggggatgcattgaactgtatcaattgtttgtactttagtgtggatccattcattccacaagtattgagcacctactatgtgccaggcacttggaaaacagtagtgaataagatagaaatctctgccttcttggatattacattctagttgggaagagacagaaaataaacataagcagataaattatatagttggttagaagctggtacatgatgcccccctaccaaataagtaaataaataactcaccaaaatatagggtaggtggggttaggagtgttaggatgggggacagggatggggcagggaagttggctgtaattttaatagtgtgtttaggataggcctcattgagaagttaggatctgaacaaagactttgaaagaggtcagagagttagctttgtagatatccaggggcaagaccgttccaggcagcagaagcagctggagccaaagccctaagcctgagctaagacagggatagaggccattgtagtagaggtgaagagtaatgggaggaaggtggtgtagggtcccctagactctgaaaaagctctggccttggccctgagtgggataggggcatgtgaagattctgagctcggggtgcataacctgctgtgttgggacttgactgtatatcagtgaggaggctgttgcagacgtcccaggaaaagaggctcaggccaggagggaagaagtagattctgattattattggaaggcagagctgaccgaatttgctgatggagtgatgaggtttgaaagatactgaagtctgggatgacttcactagccactttcctgagcacacattctaataagtcaaggctctagggcagataagtgctctgttgtaggaggatgggcgcagggagagaggaaaggtgtgcacacaggggaggctgaggggctccagccacagtaccacacccctttaatcttagctggaccctgatctggcctcaggctctattttaggctacttgactgaacaaattgggttctgaagctccagagcttgtgcctggagccctggagttcttgggggactggatccccacttggaaatgatcagtgtccctcaggagtgaggctggctgggctgctcttgggggtctgcataaacagcttcctggactttgccgggagtgtaggggagagccaagcacagcaattggcatgtccctcctgcgaagccaaaccactccaggacctgcccaagcctgtgaagtctgagacaccgaatgtgtatttacctgggctcatggcctcagataaagggaggaggaggaggatttaaggggccccagctactcatggtgaggcccaccgcacacctgccctgccttttctcctctgaggatctgggattgcaacacctgctctcttctgctgagttaattattaatgagttctttgtcacatcctctggtgatgggcagagggcgaaagtttcatgagcgctctgagttcagggagttggggaagtggagagaaagagaccaccaggtgggagaactgaaaacacaggtgtgtcagagtcagagctgacctttctcggtgggggacttgagggaggtctctctgtgttgaagggacactgcttctactgaccttacttgctgagttgagctagatttcactggaatgcttacagggggcaagactctaacatttattggactatcaattatgcatcaacttacatcaacaactcactgcccacttgctaattacactatttcttctgcctacctgaacttatgcttaattcgaatctgagggttagaaatgcccaatttaatccacaaaattctacatttcccccttaagggtcttcaagccaatttcttggacataaccctccaatggtggagaactttctgtttaggagacactaacaaagtggaatcgtagttaagaagctcctttaaatagtagctttgaggtcctagcattccaaaacggtgccagtgcaggctctccagggccaagatatggactggctgaccctccaggtttccctaaaagctctctgaccctaacctgggggaaagagtgtcctgtgagaccagcctctcaatttggacctgccacttccatttacagtggctggaagcccaggatccctgagcaaggagcccacaaaagaagctgtgttctcaggcctggcaggaggccagggaaagtctgttttgactttgtcagtcaagctatgcttcagcctttccttccaccacttgtggtcaggtctgttttctggccctccaggcgggcattcctgcctagggagggaggggctaggagactaaccctccccacaggtgggaggagtgactcacaggcagctacctgtcccagggctccctgccaaccctgtggagggagctggaggcgagccatttagttactctgctcatttctcttaagctttccttggatgagttgagctttgaatccttcctgatgaaccttgccttttaaggatcctccaaatgccccaagaagctgggatttttcattttttttttcactggggaggggaatggtgctttccagggtcctggatgtttgagtcttctcaccttccagcccggtgatatgtctggagctttaactctctatataagccctaatctttgtgttctctgcctgatcttctgtctggggtggtccaggtcacaagaagaagctgacccctgctggctttgggaaaatgctgagttcattgcctggcacaaatgcaagggcccttccccaccctgtgaattctggtctctgatgatcacttacatgtgccttgtgctttctgtttgaggggccccttgcagcccccacaggcaggtgggcattgtggagctcactacaagaactctgggacggaccgaccaacccacttgcccagtcccgtcctgggaggtgggggtgcagtgacgacagatgggtgtgacggctgccagattcctgagacccgccctgcggtggggctacacccagccagggagtctccagaggtgaggctgttgtttaaaaacctggagccgggaggggagacccccacattcaagaggagctttcaggcgatctggagaaagaacggcagaacacacagcaaggtatgttacctgtctttacctgcctggtgcgggccggatgcgggaggaggactgtatctctggatgcctggggcctggtttcagggcctgatttattcctcttcctgggagctcactcaggtgagctaggttaaaatgtctgctacagttttgatttctttttcacatttgataagcacctcagtggcttagaagaaagcaggttcagatccggggttgagcacaaaagagaagtgagaagggtgggctggcctggctcagaatgcctacttgcagggggattttcagtcaggggtgggaaagctgagaaagcactggatgaaagtcagaagatgggtctctcttaggccatcgttagctgtgggaccccaggccacatgttccctccctgggcccatgactcttttaggagagggattggaaggaatgattttgaagcattaggatctataatttaaagatgccagaaatgtcctcaatttccccccccgcccctgccttgccaagcccccagccctccaccccagccaaaagagtttgtggctgtcattggaacagagtgaacatccaattcaaggcagaagggtcactgcatgagcaagggtggggcatgtttccacaaggcaggcctgcctctgggaccccacggtggctttcgagcatccttccccagcctccttcagaatccctgctttgtggcctcccagccccacccctcttgtcgagccccagcccatcattgaagacattttgggttgcttccctttcagaagaaaccctcactcacttgttaaagacagccatacatctctccctgttgcatcccagaattgtgggcacagagcctcaaactcaaagtggccctgaatggtattggaggccatgcccgtgacaggagaaggtttgcctccaggccgtcagccactctgactcattcactttgggcggggctgggttgaggctgctggtctaggccctgagaaaagccagccctctctcttggggctggaactaggtcttggccctttctacagcttttctcctgcaaagggtccagccttttcctgctccccacgttgtccttacggctgtgtggggtagggcagggtccacactccttcccatccattttagaggaggaagctggagtctgggaagggatgggattttcccagggcaccctgtgagtcacatgccacttgagacaagggtctagagctccagcattttccaagctacaaatgtatctgctgctccaagtgtcctagatcaggaccctaggtaaagacttctgaaaaatacttgagtctagaaacagaaaagaaaaagggctagtgtgctctaggggtttgcactgttgtacccagtttgctttgctgtgtcctaggaaaggtcctttctggggatcaccccattggctgaagatgagaccattcttcctcttgtgttttggtaagtaccccttcccatccttccaggccctgttatatggcagggaggcaacagccacagggagaaggagagtttaccaaagtgtgggcatcacctgtcacctgtagtcccttcagttgggaatacttgtctactggggacacctgtgagatttccccattcctttgggcctttggggaagaagtttctctgccactctggaaaggctcccaaatgtcttcttattctcagccgagggtggtttgtggtttcctgagtgctctccacagtttcccatcctttctcaagctggttccagagccactgtggcttaagttcctgttttccagtgaattgtagctgggcactcacaaagtatggctggggcagctttgaagataaaggagcagaataaatgcaggcctttcttaatgttctgccaatggctcagcagtcagccctcctctgggctgctgacagaggccacaatgcaggtggaaagagctgcggaccttgtcatgatggccgagtctatgtctccagtctggttctaaaagccatattttagggtcatctatggtttttggttgccagtgtttctcctcttctccttttcaagttttgagttctggaatatgaaatcaactttcaaaatataacagtatcaatactgcaattattactgccagcagcgagtggaagcttgagtgagggaaaggatataatcttgctaatgtcagcttccctgaaagatactggggtggccagtgaggtccctttttttctggactgctccatcacacatccctgtgatttcagccctgcctggcctcctgcatgcccaacaagcctgctcccgtggggcctgctatccacctgttggggacctgcttgttgggaggacccggtttctccgagcttcatctacctgtggactgaccaagcctgagacctactgcacccagtatggcgaggtaggccctacttcccaggactggaggaaggcgggatgggaggggtgtgtgagctgccatttgtccactgaatacttagaatgtacttggtgtaggccaagccctgtgtactacacggactggggagtgcagtaaaagtataaggccagatccttgcctctaaggaatttacctgttggttgggcaagaggaaatgtactcagaattaactaaatagctcatttctctcttatctctctgagatgacacggagtcttttctcagtccttgggcatgggcaggatagtctttcaagtcttgggaataggcaaataggccaaacactggccgtttatgtgtatggagcctcatgtgttatttggtgctgggatgtgtgggccgaactgtgttcttgccatggcaggaactgagctgtgccatggtcagtgagatagatgaggaagtgacttgagcttatccagcagggtcagaggctcagatgtaagttggatcaaatccagaaacacgatgctttgagctatgactaacattgcctgttagtcatggcttttacaaacttttcttctaatttgtctctgggtctttttttataggaactttggttttctttttgtttgccctcaacaggggggaatctttctttaccaaagttgaaatcactcagtgttttcttgtctaccagctgcctcatttagccattttgcttgaacaagggaatggataagggagtgatttgtcccgagttgctgtagccttttggggaaagagaccggggttatctgtcccctttccaggctgcccttgtcttctgggctgtggaaggtggtatctgatatggcctctgggcctcactgcccttctagtccctgtgttctcttggctattttagcacagatggtatagggaaatgactggagttgctgagcagagatggctgtggtttttgcatctcacccacttggatgtggggaagctcatttgacagggttgggtaagatggccagccctagccaggactccctgtgggtctagattactccatgagcatcaggggacctggcagtattgagtattgaatttttaaaaaaataaaaattaaaaaaatttttttttttaggcaacagagtgattttggctgttccctccacccataacctccaaattatgagcccatatctaaaaatttcagggagacctctgccgatttcctttctcaggctgacttgcattttgggaggggaggcaaggagaggtcagagacccctatgttgggatgtacccttgatcccagtcctgtctgaaaagtttctcctcctccaggcctggggcttttggcttaacactggcctgccctctgcctctctgatgccccaggaagccagctgtcttctctgctcctaagtagccccttgagagcaaaacagggtgcttataaaacagagtctagacttttgcaaccctggggatggataaatctcagctatttttctgctgtgaaagctgagaagcactggctgtttcttcttttttttctaagggggaataaatttatctagccttttggaaagaatagaggatagcagggagtatctttcatgtagtgtgtagtttcaggtctgccactgacttgaggtgtgaccttgggcaagagattacccctgtgtaagcctcgctgtccttttctgtaagtgagtattagatgagatggtctttagggtccctccttttccctaacattctttggcaatgagccgactgctgacaatcagcatctctcccccatcttccacctctctgtcttgtttcatttctctttccctcactactacatgcctaccctttgcagaggccatgggttccagcaatgaagatagatactaaaggcatagagactccctttttgtcctctggacagatgtaccctgaaccccctctgggtgctctggtggctgcatgataagaattagaaattcaggttttaattctgctgagttctaatttcagtttttgtttattttgttattaaatgatactaatggcaattataattcattaagcatatcatatgtgtctttggcatcatattaagagttttatataaattatctcaaataattcttataacacccatgaagtggctcatgttttccctgtgagctattgggagggtttggttgtgtgctgggatcttagacttccgagagaaacatatcgtgtattgagttttctgagtagttagagatagggggtgtactggacagccacagccagaaatgaggctggccgaatgcaatgctgtattcctactgcctctcccttcacccttccctatcacccctctctagtagttcccactcccacagacacacttccctgaagccaaggcctctggctagtgcctctgttctatctccatgcagggatgacatagcgagccctgagcccaggaccagatcattcttctgtgccacatcctactgatgtgccatgaatgcaaggacaatggggtggagatttatgacccctggacatttctgccttgctcactccactccccaacccagttccagccgactaacagagggcgactcagcagaatggagttacaggagcagtagagactccttttagttccaaaattgtctctcctagttcccttcctccaagtgtggcttcctttttgtggaccagtcttagcctgtttgcatgttacctcctccacccaattctgtctcagttgctgaatcccactggtctcaagggcttgcttctgtaaattccgggtccatgttgcaacccttgcaatggacataggtcttggccagctttgccttatggcatcttctctgcctccccaactttgcccttctgggctcatctgctttgatgacccattaactgtctgtggttgggacaaggctgttctttgccaaaatggcctgaagctgtagtcccatcaccctggcctcttgctttctttcttccagctcctagatggattctaggaaaactcactgcactattattccctcaatctcaaggcatggatgaaaatgtctgtgattctgtgatgcttccctgccctcatttacttctgtgctatccgttggcctcatttgaaaaatgggcttcagtggttgtcatgagcactctataaaagaatgtgtaaagtgaccaccagcatagtgcctggcagatgcaaactgttctatccaacccttctctcctgcctgcctcctggtggctgcatccacatgcagaggctgccccatctgcaaatcacactcctgagcatttcttccctgatcaggacatgcgttcgcgtacctcactaaaatccacccatccctgggctgccctcctctgtgcctcccaaggtgatcggtgccaatctgacttagagtgagctgttgaagaatccacaggcggtcatggttagtgaagtcaccccagactgggggtgaggactccctcattctggttctggttttgacactaataacagggatgtggccttgtgaaagtcagggctcttcaccaaaccaccatttttccatgtgtgaagtgaaggagctgggttagtcaacctttgccgtttattcagcgctggccactcagcttgcttctcagagacagatgggctgtgtgtgaccctgagagtccactgtcctctctcagggcgtgtgaaggcaggggctgcaccatgcccttcggtcatctctgggatgacacgcattcctcaagaaccagcggatttgccggaaagctttccatccctgatttctgctcccgacaatgtctcctccagtgttgtgtctgctcccctaaatgctttatttatcccccattccctccctttctggggaaaaacttaattgcccagctgccttaataacagtcttacacagcgcattcctcaggttaattatctaagccaaacagctgtcatttttatctcttggaaacaagctgaggaacagtagccagttggaagtccctcctctctaatacgcgcaggcgcacatgcatgtaaatgcacccttatccccctgcccgctgacacacacactccaacgaccactgcctttctttgtttgacagttgtctgttttcttgattttcaggaaggctaatgtgtaggcagaggatgtgttcatatatgtactatgatccctgtactcaacccacaagggattttgagcccgcctctgaccaaaatatctgcttttttttttttttttcccctgggacacagagtcttgctctgccacccaggctggagtacagtggcatgatctcggctcacagcaacctctgcttcccaggttcaagtaattctcctgcctcagcttcctgagtagctgggattacaggcatatgccaccatgcccagttgatttttgtatttttagtagagacagggtttcaccatgttggccaggctggtctcgaactcctgacctcaagcgatctgcccgccttggcctcccaaagtgctggattacaggtgtgagccactccccccggcccaaaatatctgcttttttgtttcccagaagccctaagcaggtctaaagcttccagagctctaccttgggagtttactgttttggatgaagcattactgagttccttgtttaaaacacagatagccttgagaaaagcaccatatcaatctatgacctgccattcatccctcagcaagactatgtttatcagaaacttagatgtgacttttgcaaagggacccacgagacccaaaatgagtcttgttttgaggggatagaagaaaatggaaagggacattgtagggaaaaattgctatcagagagaagcaaaacttgggttggtggaatgtgagattcttgggtcctaattgttatgggctaaggggtaggccttgtgaggttaaaagcagagaggagaaatgtgaaatgggaaggcccgaagacaaacctggatggcctcacaactttgctagcctggcttctcactccattgcttctggggtccaggcccacagaagcctctgggaactgtcttgcagacctaccttgcttcttttcctggccatctaccccctgcctgggtgccatatgagggtctgtagccattgccactggcaggacctgtagaggtccccggcacactagccaactttctgcactcaggtccaggggacatccctctttctggagatgtctgtgctgaagttgaggttgcctttccagtggggtggaatgaagcagaagaagggagtttcctgaaaaccaactctgaaattttcagtgattgccaagtgactgctatgctccttgaatcagaacagcaccagtatgctggggaggaaagaaaaaaaaaaaagaacagcacaggtagttttggagtcagacaggtgggacaagaatctgtgcttcatcccttgctaactttatgggcttggacacatttcttaacttatcactttcctaatctgcaaaatggggatacctaccatttgtaaatgtagtatagctacctcagagatttttgaaggatggaataagataatatatgtacactgctgaggactgaggctggtgcagtgtaatttttgagtgtgtagcatatatcatctctataatcagcttcagagagtgatttctgaatttagttaggatggaaataacagctgtactgagttaaggctttggtcaaaatttcacttcgtgataaggaaaaacacaaagttgaaagtatctcacatacggctgtcctcccacccagcgcctgcactaggtgctgccttttgatcttcattgccaatatgcattgacatagaaatgctgaggcttttgaactgcggtgggttctaatggaggcctgactgaccataggcctcaaggatctccttctccctgtccatattgctggaaaaagtgtttctccaggatagcatctggggaatgtcttgtttttctcttgctttctttgtctacttgctgagagtacctttaacttctgggctgatgtgctagagcagggaagaactctaagagcatgttagaacaagatggaactttattatctcattcaacccttgtatttcaccaataggaatgtggaagtggaggaaatgtattttcttgaaggcagctagattttttttttttttttgcttttggccctggctggtggccatgacccgatcgtagcttcttagatgaactcagacagccctctggcttcctcatgggagggagctgggccatgcataatcagagcctgttttcctattctcccccagaattagctctgtgttttacaaaggctcagagtttttagttgtgtgtgccctccttttccacccatctccaccatgattcaggcccctgctggctcttgccctcttgctcctttgccctcccctggctctctgggagggttcatcttccagccagactgctgagcttctagaaagctctaggataagggagaaggcctagcctttccagctggagagcaagtaggagccaaactggctggaggcctgacaggctgaattgataatagtactgtgtctctgaggtaatgcagccaggagaatgccagccaaatgaccccagagagggaggcagctgcagcagagagctgccatcactgggagagatgggggcatatcacatatgagagattctcacactgagaatcacacatgcacacgacgcttacaaatgtgtgcaccctacatataagcatacaagaataaagcagaaagggaaactgagacccagaggggaaggataaattagcagcttgtcttcatgtgggcttctgccataaactactctatttcaggcttctgtcctgctagctcgttgacaggcagagctacttaaaatacctgtcttgcctgttggcttagcctgtctctgaggattgaggtaaattcctccttcggctatgttactgtgataagcagcatgcagtttgtaagcctatgatgccatctgatcctgccatcagtgcctgcacacgtggacagaaggagaagaaggcatgggtgccccagattatccccatgaagactgagggaggagcagggcaataaaccctggccatttttagttggttttgttttatgatactatttgctctcctgaatataaaagttaatatgtatccaaggtataaaaatttaaacaagctgggtgcaagtggctcacacctgtaatctcagcactttgggaggctggggtgggtggatcatttgaggtcaggagttcgagaccagcctggccaacatggtgaaatcccgtctctactaaaaatacaaaaattagctgggcatagtggcatgtgcctgtaatcctagctactcgggaggccgaggcgggagaatcgcttgagcctgggaggcagagggttgcagtgagcagagatcgcggcactgcactccagagtctgggtgagagagtgagaccctatctcaaaaaacaaacaaacaaacaaacaaaaaagcttaaacataataaaaaataacagagaaggaaaaaaagttatctatgattccactacccagagatatcaggttgaactgtatgcagttgccatttttgtaggtcaaaatgggtgaatatcagcaatttcatgttttcacttaatatattggtgtatttccttccaaatactttacattcctttaaatggaaatatatacatatatatatattcacacacacacatatatttgagattataatgtatatgcaagtgtatgcccagctttttttcataaaacataatataatcatttctccatgcaattaaaattttttctctaaacagtgtttttaatagttacataatatcctgtcgtttgggagtatcaggggcatttccgcagtctccagctccttgtcccatggcccagggaaagaaagaggcttgtttctggcactctcttgaccagggaagggctggaccagctcccagcagagctggggagaaagctctggtgacaggcggccggaaggcagctggcccttgtctctcctcaggacatgtgctgagtgcagacagaggacgggagtggaaaagtttgttcctgagaggctgggaagagtataaagaagggcatgctcactgccagggaccaaaataggggtctggaggggagtcaggctctagcaagggccttctcttgcccagaaaggattattttaagtgctcaggtatttcagccagcgacaggtctccagtttctgtggtaactgagctgagtcagctggagaagccccgtttcttcccaaagtgctctctctgccttagccttccctgtgataagcttcaaggtcagaccaagcccttcttggggccttggggctcgctgtgtgagacagagactgctaccctttagcatacttccctacatctttgccactcagctagtttcgagtggaagtgagaggatgaaagaagggagaaagagagagaggagagggaccctttctgatgctaacgttggggatcagtcaatagcaaagtcatgttgcctctttgtgcctcagcattcccctctgtaaatggggctaatactacttatcatgtagggttattgtgagatttaagtaggttattgcattgaaactaccaaggactccactgcacatggttgtactccaccacttactactgatgctttattacctactcactcttccacccctcctttcaaactccctgagtgcaggaagggagtgcctagtaataatgctaatgcaaatagtttgcctttactgaaaatttgctattcgtttattcaagaagtatttagtgagggtgtattatgtgctaggtatttttctttctttttttttttttaaattttttttttttttttgagacagagtctcgctctgttgcccaggctggagtgcagtggcacggtctcagctcactgcaagctctgcctccatgggtcatgccattctcctgcctcagcctccagagtagctgggactacaggggcccgccaccatgcccagttaattttttttgtatttttagtagagagggggtttcactgtgttagccaggatggtctcgatctcctgacctcgtgatccgcccgccttggcctcccaaagcgctgggattataggcgtgagccaccgcgcctggcctgtgctaggtatttttctaagcactgggaatacagcagtgaaggaatgcaaattcctgccctcatggagtatgcattctagaagagggaggcagacaatatacaaataaataaatagacagtaaatatgcaatgtgtcaagtggagatatgtactatgaaaaaaatataacagggcaagggaatgcacagtgagtggtgggaggtggggcaatgggtgctactttattttattttattacttttttttttttgagacagagtctcgctctgtcgcctaggctggagtgcagtggcacgatctcgtctcactgcaacctctgcctcccaagttcaagcgattctcttgccccagcctcccgagtagctgggactacaggcacctgccaccatgcccagctaatttttgtatttttagtagagacagggtttcaccatattggccaggctggtcttgaactcctgacctcgtgatctgcctgccttggcctcctaaagtgctgggattacaggcgtgagccaccacaccccaccaatgggtactactttataaagggcttatgtgccagctgttatttgagccttaaacacccaaagaatgaatgtttaataaagcatttttggacatgccaagggcacctccaagcactaggaagggtgatagttctcttcatttgcagactgggtgagacctggaaagtggagtgggaagcagaggcccagggaaccaagacacctggctcccctctttgctctctcctgttgcaggctgtgccagctttggagagggaagatgggtgttgggcagggaggttctatcactcaaggcataggccccatatatccactcagactctttgggtcggttctttgttctggtgagtggaggcttagaggaaagcagcggtacagggtgtgtggagggacagttttccctacccagaaggacctgcaggtccaggagtttcttgtccaagacttgcatctatttgtgggtaaatctggagccctctggacagtatggtttaagctgcgcacagggtttgggatcatggctactcagagaaagcagattttatgtatgttatatgggggagctgggaaaaggtcgtgttatctgtgtgtgtgtgtgtgcgtgtgcgcatgtgcacgcgtgtgcgtgtgtgtgtgtgtgtgtatgtgtatatgtatgcacataggcacaagctaaaagaacaagggatatatcgcctctctggccatgctctttttcttggtgatccttgctctgccatgaaacctatggggttcagttctggctcctgtctcattccaagagataagcgtaggccaggttattggtgacctccccagtgaggccggttgctctcctgtaggtagggaataccgaacctgagaaagatcctcacgccccagatgtcactgctggaaggccttagagatcatttgaatgtcactagaattttgggtccctgagggcagggcctttgttttgttccctattgtaactccagagcccagagtagagtctggcacatagtatatgctaaataagcatttgctgggtaaatgaaaagctctagctcaatccccacttaatttatggaggagaaagttaagcctaggaagtagaggtgacagagctaggactgtaactccacatttccttgtcctcttttggagtcctctctctctgatccttaaaaccccagaatttcccaggctgccaggattaaatgaggtaaactataaaactttccagcctgtgcccagtatgtcgtagatgctcaaataatatgaatttctccccccgccccccttttttttttctcggcacttttctcaagtttctctgcaaggcaatatcatatactcaagtattttttcccacctcgtacctcttctccgttcacacatctattcaccattcacttgctatgtgttaggaggggcaccaaggaattaaaagatgaccaattaaaaggtgatcaatagctgtgttttaagagattaacccttcaaattgtattaataaaattagtgattcctaagggcaggatttccacagaggagatatgctgggatctcaggacgcaagggggaattctatcaggaccccacctctgagtgtctgctatctccctctcccacagtggcagatgaaatgctgcaagtgtgactccaggcagcctcacaactactacagtcaccgagtagagaatgtggcttcatcctccggccccatgcgctggtggcagtcacagaatggtgagcatttgccatctacgggaactcaaactgtacagcctccacaggataagacggatggaaggtgccctataaccctttgggtttcccaggcatttcttatggtggtgtgacatgggtgattgataagaagaatctttctgcctcatatttggggtctgttggatgttatggtagaagaatttattggaggtgaaagaaagggtgtgaggagagaggaatgtctttatttccctccactcagtctcagtgggtgggcttgcagaattaagtttggggaacaagtctgtgtggaacagacaagttgaagccctccaaagtattgaagacatcaggtgatggtgggaaggaaacttagccaaaaacagataggatcttgaatagataatataagcagaaacataccactccccactcctctccaagagggagtttggaaaatcaaggttagagagtttctgagttcctagagctagtctaatccagggcttccttcagggctggggaagtggacagtctctggatgacagtttctattttttgtccttccagatgtgaaccctgtctctctgcagctggacctggacaggagattccagcttcaagaagtcatgatggagttccaggtgtgcctcctgggggtggcagtggataggagaggggctcctgggccatgtgggcgtggagccatggaggagcacagtgtccttgtctctctgggttggggcaacactcaccatgagcctatatcatggtgacagaagaggactcgctcctgggctaaaagtggcacctcctggctccctgtcttggccgtgcagtggttgcatatcctcttcctctctcattctccaccctcaacccatctaattaattcagctctgccaagtaccaattctactgggcccggttgcttgttgtacagttgtgtattcttggtatactctgttttaataactttgcatattagattgactttaacaagcagccaagaacttgcctatccaactaactgatggatattcctttggtgcagctctcttggtgggcaatctactcattcagcgccattacttctcaaagcactttcagattctgcctttagaacatccttctagatacttcttttggaggaaacattttcatttaattgccataggtcaattttttcttttcagagatgatttggttttattctttctacagaaatagtcagatattcaatgatcaaatttggttaataagattaaaggattaggaagggagatataattttcaggagttaaaatgagcttggaataaaaagtaataggacctaatttcttacatgactgaagaagttggctctaagagccttgccccatctaaaggtcaaaaatattttgagaaatgccagcattgtttgaataaatgcccagtctctaaaggtggcaactttgaagggcagcatattcatttgatagacagtgttaaatagtctcctcactttatcatcgctcacctgttcatttatttgtcatttatttgtgagcgcttattgaacactgattactcattaggcttggtgtcagatgttagggatataaagatgaataaaaccaaatcacagtcttcaagctgctttcaccatacgtggggaagtcagtagtgagagagtgcaatgtgtgctctgatattggtaagaagaggtgctgggagcccagaatggggctcttgcatggtctgtcttgggagggcttgtcagggagtgcacccaggggaagatgaactttcatagaccagtaatggccaggggaagggcaatgtttattccaagaaaacagaaccataagcacaaaggccgggaggcaggcggcaagaagatgaggtatatgactggggttgggggcaagggaatgcacacagggcctggagggtgaaatgtgcttggtggcaagaggcagggatgtggagggctgaagactgctgcgagatgagtttccaggtatacacagggggaggggagcagactgaagattcaccatttgttcaacaaatatgtgctaaacacccatgtgctaggtgttgggggtccacctgtgaaccacagacaataggggctacagcctggtttactgagtctcaaccaggggcactgttttgccctctcctctcccccaggggatatctgacaatttctggagacatttttggttgtcataactatgggtatgtaatgataactggtgggtagaagtcagggacgctgttcaccaggctacagtgcacaggacagcttctaggactaagatttctccaactcaatactttaacagtgagaacggttgagaaatcctggtctcacaggaaaagaataaaaagcaagaaaccaacaagtaaataattggaaatcgtggtgacgtttctgaaggaaacaagatgctgaaatagaaaataatggggcagggtggggtgggccagacgtgagcaggagaatgcagttcagtcaggtatcaaaagatctgtaccaggaaatgacatttcagctgagaacaaaagatgagagggaacccaccagcgggaggagcattccaagaaagactggacaaaggctctgaggagggaatgagcttggtttagggcttgaagagaagaggtggcctgagaggaggcagggcccagggagcctggggcctcttcactcatggtcagaagttcagatttcgttccagaatagtattggaggatttttagcagaggactgacaaggcccattttatgttttaaaatcattaagaagatgaccagcctggccaacatggcaaaaccctgtctctactaaaaatatgattagctgggcacagtggctcacacctgcaatctcagcacgttgggaggccgaggcgggtggatcacttgaggtcaggagttcaagaccagcctggccaacatggtgaaaacccatttctactaaaaatacaaaaattagcagggcatggtggtgtgcgcctgtaattccagctactcaggaggctgagacatgagaatcgctggaacctaggaggcggaggttgcagtgagccaagatcgtaccactgcactctggcctgagtgacggagtgaggctctgtttcaaaacaaacaaacaaacaaacaaacaaacaaaaaacagaagatatgactgagtaagagtgaacgtggggaaaggggaaatcagatgaagcttactagggagatcaggcaggaggggaccctgaagctggagagacaggcctgggcctggttcagtatctgctttggaggctgagtttattatagacctgcagttccaggaagttgttcaagctgggagctgtcagcataaagaccacatttaaagccacccaaaatggatgaaatcattttgtaggaaggagcagggactcaatatgtcatgctaaggtgctcagtttatatcatgagatcaatgcagactgattgaagctctcacagatcagataatcacccaggaagagctctctggtgagtggggaatgtggtttggagggccatgacagaggaggctggacatgagttccaggagagagacagagagaggagagagagagagagagagagagagagagagagagagagaataaaaaatggtcaactgtgcgaagtgtaggagcagagaaatgtctatcctggaagcctggtgagctgagctagggatcactcctggaaggcagatcctgggagaaacttctgtggcctgtggtatgccaggaggtttggacccggatgctccgagcccacttgctcccactgggccccctttctcccgagttcactggaggagcctgtctctctgcttgtgtctccacggggcacagccccagtgcctcccctctgcacactgcccctgtctccacaggggcccatgcccgccggcatgctgattgagcgctcctcagacttcggtaagacctggcgagtgtaccagtacctggctgccgactgcacctccaccttccctcgggtccgccagggtcggcctcagagctggcaggatgttcggtgccagtccctgcctcagaggcctaatgcacgcctaaatggggggaaggtaggtagagggaatcctgaaaagtaggcctggggagaaatccctgatgtcccactgttcacacagccacacggactcctgagaagggacggaaacaccctcgccagctccccttgctgactttcctgaattcccaccagtaatgacccctgtggccaccctcaaaacatttgctgcttatcctctttgctgaggaaggatatttcagcaacaccttggggccaccgcattactcacccctgccgtcttccacagccccctcccccgtgactcattggctcatccctctagtgggaagatgaaatcgaccctactttgatatgaggactttgggatgctagttagatgcaagtgagcaaattacacaaatttcatttcaccttggtagggtttaacacaaaaataaacattttcagtttaatctatccatctaacccagtcttagcccttggagggaattctggtaaacccagagcccgaattctcctgagcttaaaccctgagctagaaataagaacctgcctgaagaaaaactcagaatgtttctccctaagtcctcccaacgtgggtcaaattctttcataactgcgtttccccatcccctggcagaggaggctgtagtttctcttctcctttccctggctgagacacaggtgagccctcagagctgctctcatgtggaccgatgctcagagtggggccctctatgcaggccatgcaactcttcctttggttttagcagttcctccttggttatacccttacgcaaatctatgttaactacattcttcacacaccagataagaactttttcctaacttgtggagggctgatgtgaaaactcttcctgggatatgtagatgatgagtggattttttttttttgaataaatcaaagcatagttgaaactgggattgtccagagtgctgtggtcacccacattcacgcatccttgggttttagatttctcactcatcctgagtcatcagaaaattagtatctcctaaacccttatatgtagatgatatatcttaccatactttttgacccagggaactcagaaaattcttaggatacttatattttcaactggcaggggttgggggtggggtacacacacacacacgtttagggcccagtgatcatctttctcccccacagcagatgacaagcctcatagccatggtctatctcaggttccaggtaacaaggacttcaagtgtgaggcatataatggaaagaaaggtttcttctgaactcggggcacactatttgtctcttcttcagcgcttctctttcccttccctctgtaggtccaacttaaccttatggatttagtgtctgggattccagcaactcaaagtcaaaaaattcaaggtcagtgtggttacttctcttgtccatggaactatgggtgggaaaggaaacagagttggagcccaggtcatggaaatttcctggtctttcatgtttttgtcaacgtggttggggatttgatacttgccctgcttgccccatagggatattgtctgtgggatgctatgggatggttgaggtctggagaggatggcccacggtatcacatatgaaggagactctatgtgcctctaacttcctttctttattttccattctccaactcttccctccttgctgtttggccctctcagaggtgggggagatcacaaacttgagagtcaatttcaccaggctggcccctgtgccccaaaggggctaccaccctcccagcgcctactatgctgtgtcccagctccgtctgcaggggagctgcttctgtcacggccatgctgatcgctgcgcacccaagcctggggcctctgcaggcccctccaccgctgtgcaggtaacagcctagggtgggaaggggagaggaagggggcaggaccagggcagactacagacattcttggggctcctgtaaagcaggaagggcactaaatctaagacttgggtatttaatacttcagcagcaacaacaaaaaatcgaagtggttttcgttccaaaaatcagaatcatttagtacttctttagatctgcttcctaatttgagatgattttcatttcatttacataagtgtggaaattgggagggagtttaagccaatgattctcaaccctcgttatgcattataatttcactgagagctaaaaatgttgcccagccctccaccctaagatattctaattttatgattggcttttaaagctcccaggtgactcgaatgtactgccaggtctgagagccactggtttggggattttaaagtctcagctagtggtgagatatggggcacggtgagagaccaatgtttagtacagatgctaagtctaccctagaccaggcggattggcttcagcagggatggggtttgagacgttccagtttaacaagccctcccctcccaaggggttttgctgtgaaaccaagcttgagaaccacaggtagagaagagagaaccttgagcaaagaagcagagggacccaacatgggagcgtgacagctgtcctagtgacagggggacaggaggaaatcatgtaagatggcctgagtgggaaatagaggtggcacaagcctcagctggcattcttctttccacttctgggccaaattctgccccaggctgcagaggtgtacagagggaggccagctcagggagtgtgtcatctgtcagggcccatgagacatactcctagaacccaaggctgagtgacacagagggaatacaacatgctatgacatgacgaggtgggagggagccacccagccctggtggtcctcaaatctggccatgcagtggaatcaccacttttaaaaggtgccactgcctgggtctcatccctgagattcagagtgaattgggtctggaccttggcattttaaaaaatgttccccaggtgacactgaggtacaggcagtgttgagatctatggaattagaggcaccagggaggccttatgagagaggtgccgttctagctggagcctagctggcaggattttgtgaatgaatacagagagaagagaattctaggcagaagaaaaaccattgctaaaggccaaaaggtggagaaagtagggcttgcagagggagcagctagaagttcatcttgctatgctgtcagcaggacatgggagctgagaatgcagctaacatgatacaggtccttgaatgccaagctgaaggtgttgggcttaatttggaaggcaattagcacgcaacagctattctatttttataccttaatgagtctagtgacagttcatcacaacagttccattaaccaaacaactgtattcatagattgttggaatagaaatctccagagggccccaccagcttctggatcccacagtttgccaagggtgtctgagcacctgccaagcgctgcctctgactgggtgtcatgggggtgtccaagtgcaagcagcgagcttgcaaaaacctcactaggggagcagtgcgggcacacgcacgtgcacacacacacatgctcatatgtgcagaacaatagcagacagtttcacaggagctgggtgaagtctgcggcattcagaggaagcttcctggaagggttgggatctaagccagatcctgagtggtgcgcagagggtcagagggcagtgggcaggtccatccctggtgcccttctttgttgattactcctgatggctgacggtccccctcccaggtccacgatgtctgtgtctgccagcacaacactgccggcccaaattgtgagcgctgtgcacccttctacaacaaccggccctggagaccggcggagggccaggacgcccatgaatgccaaagtaggagctttggatcacccctcccctgtagggtctgggtcgagtgctggcccctctaggccttgatgatctcacctgggatgcagggggatccagtctttcttatgtaaatctaaactgaattgcaccattacaattcaagctctcctggctctgtgaggatggagagagtatttgggtgacatcctcccactgtccccagctagagcctgcttcttctggcctctccagttgctttaccctgtttaggacatatctggtttttctattgtcatttttcctacttcaaatggctccctagaatcaggccctttgtttacataaatgaggaaaacagagattctcatcctggagacaggcagtgacccaggaggagaccagtgttggcagtgggagggttggggatagagcattcaaagggctctttctttggcccaacatggccactgttcttgggtttattccaacagtaagaatcaggaaggctgagttcttattctcctctgctttcttattggtcatgtaaccttaaataagttatacaaacctcccttgccctcagtttccccacttccctgccttgatcatcttgcagagttgttacagatgccagtgagcttttgtggagcatgctctgtagatagcaaaggtgtgggtcagatgtcagccctgggactctctttttccagggtgcgactgcaatgggcactcagagacatgtcactttgaccccgctgtgtttgccgccagccagggggcatatggaggtgtgtgtgacaattgccgggaccacaccgaaggcaagaactgtgagcggtgtcagctgcactatttccggaaccggcgcccgggagcttccattcaggagacctgcatctgtgagtagaggctccggagtcccagagtgtcatttgtctgttactccccatctcctctgggtacaatagagtacatgttcctgggcacaccaaggccctcagggagcatgaaaacttggctgtgagtcaggatttgtgggagattattttaatttagctattactgagcaagtcacttaacctctctggaccatcaatcagacaatcaatcaagagttaggctttatttggggcatagggaagaaaaaagtaaacataagatacagtttgtgccatcagggaacacacacactgtttggcaatataaactgtatacacctgcagaagagggatgaaagcaccttttccgtatgtatatgattgcctttaccatgttgtaatgaggtttgtgatttaattttctatttctcccaacatcgagaactcctccatggcgaggattatttctcacatcctctagccctagcacactgactggaaaataactgatgctcagggagtgtttgtgaatgtaatgggaggcaacaggcagaggcagcttaacatgcacacaagagccagcgacttcatataggagagggctgcctggactgaagcaatcagattcgggcaggtttagtcagaaaagactttctggatgaaggggtcttacattttgaaaggtctgaaagaagtcagggagtgggggttggggaaagctgagtcactttctgttgatgtttgtttctgggaagagtgagacagaactgagtttgatccctgtttcttgcatgaacttgtaatgagaacttgaataagttatttgacatatctgagcctcggtttcctcctctgtacaatgagaataataatctccaggattatcatgaagattacatgaggcaacatatgacagttcccagttcagtggttggcacagagtagttgctcagtaagtaatgacaacaaaaccgcttctatagtacttagcatgtgccaaatatgctccccctgctttatgtttactcatttctttctctctctctctctctcttttttaatggagatggtttcgctcttgttgcccaggctggagtgcaatggcgccatctcagcttactgcaacctccgcctcccaggttcaagtgattcttctgcctcagcctcctggtagctggcattacaggcatgcgccaccgtgcctggctaattttgtatttttagtagagacagggtttcaccatgttggtcaggttggtctcgaactcctgacctcaggtgatccacctgcctcggcctcccaaagtgctgggattacaggcatgagccaccgcgcacagccatttactaatttatttctcataagaagcctatgaaggctgtatcattatttttattttatagacaaggaaattgaggcacagagggattaagtaacttgactaaggctgtgaatttgaaatccagtggtggaacaaggatttgaaccaggcagcctggctcctggaatctgctctgaactctacttttctttgttcctactgcggtggctgctgttgtctctcagcctgcgagtgtgatccggatggggcagtgccaggggctccctgtgacccagtgaccgggcagtgtgtgtgcaaggagcatgtgcagggagagcgctgtgacctatgcaagccgggcttcactggactcacctacgccaacccgcagggctgccaccgtgagtagggggcttggcccagcatgacgtggggtgggctgcatggggccaccagacccacggcttgccctgctcactgtgctctcttcagaggaaatcccactgcagggtagacagagggggtatgcccgggcctttgccaggagtccggacttcttgccctcttacccagcgccagatgctgtgccactggcctccagcaggtggcagcacacgtccgagttggaaggtgggactgagtcagccagatggagggtgggcaggcaggcggctgagctgccaggtggctggaactggtgggacagcgcaggggtcctgtgagtcagccatgtcatctgcagggaagggccctgcccagttcttttcccaggcagcgcccctccctggatgtgtgtcctctgggggtgagtttttcatggagcgtctgcctgagctcagcagctctcctcctgcaggctgtgactgcaacatcctggggtcccggagggacatgccgtgtgacgaggagagtgggcgctgcctttgtctgcccaacgtggtgggtcccaaatgtgaccagtgtgctccctaccactggaagctggccagtggccagggctgtgaaccgtgtgcctgcgacccgcacaactccctcagcccacagtgcaaccaggtacgaagtgagggtggtccgggggccccctcagtgggaggggggtcctgagcaccagcctctctgctgcccctccatgctgcccttctaggcctctcccctgtcagactgggcgtcttctgtccccgttctcatttggggaagtcaccagatgtccctccctctgtggctcttggccgtcagtaataccatatgcaccacaccttctgaagggcctatgctgggccttgacttcaaggctcatctctgagtgggagcccttgttttgtgggcacagcagctctggaggtggccatgagccctggattctacctgtggaccaggaatctaggacacagtccctgacaccagggtaaggcagaggctgtgaggcagggtccactgacggtgctctccccacgcagttcacagggcagtgcccctgtcgggaaggctttggtggcctgatgtgcagcgctgcagccatccgccagtgtccagaccggacctatggagacgtggccacaggatgccgaggtgcatgctcaaagcctgggggacgctgaggctctgggggccgagcacgcgggtgggcacatggtgggggcgtgtaggtctgcagcagggcaggatgtcctgtactgatgcatgtggtgtgggcctgggcagccctgtgagtgcacacactccggcctgttggcatggcctccaagcccctgaggcaggcctatgcccgctgttcctgcgtccccgtgacatgctggttgctttgctccccacttccctgagagagagagagcatttcccagaagccatctccagggcagcagcaaggaggggaggctgtttcttccctcttcatagatggaggaagtgagtcctgaaggggaaagggtgtcgtttcccacggagtcagtttgatgtcaccacaggagcacaggccttggagtgtgcagaccagattgtggtcccagctctgcccctgcctcactgagtgactttgagggagctgcttcccctctttagacttggtttccttcttagaggaagaggcatgctgtacttaacctctctgtccctcagttgcctcatctagaaaaagtgggaaaacaagagtgctaattcccagagtggtgtgaagatcaaatgagttaatgtgtgtgtgtgactttaagtggtgcctggcacatggtaggtgctaagtaagcgtttgctttcactgcagctgttaccatggcttttattctggctgcgacttctgttattctaagtcatgtagaaagagcctcaggtcagacctcctcttcagggctctccctgacagctgcttctgtctccctgacccctgtctctgactgtcatttttcttggccctagcctgtgactgtgatttccggggaacagagggcccgggctgcgacaaggcatcaggccgctgcctctgccgccctggcttgaccgggccccgctgtgaccagtgccagcgaggctactgtaatcgctacccggtgtgcgtggcctgccacccttgcttccagacctatgatgcggacctccgggagcaggccctgcgctttggtagactccgcaatgccaccgccagcctgtggtcagggcctgggctggaggaccgtggcctggcctcccggatcctagatgcaaagagtaagattgagcagatccgagcagttctcagcagccccgcagtcacagagcaggaggtggctcaggtggccagtgccatcctctccctcaggtaattccctttccctgccaagcatttgcaagaattatgctccaggggttccagtaccgggcatgctggtccttccttacatttgtacagtgcattacagtttaaaggcattttcacagtgctctctctttcaaccattacaacagtcctgtgaggctggtgtggttttgcagatgagaaaacaggcacagacaggtgatgtgacagagccacatgaccaccgaagggcagagctgggcctcagaacacagtccaggagcccaagcccagcgttcttttaagtgcccagtgctgcctgtgggagagagtcagctctggattagtcaccctggcggagggcatccgagaggcaggggctctaaaaataactcacgtgtggctttggaatggaagttggtcccgcccacacccccatcccaccagcagaggtgccttcttagtgaggttcagttctggaagcttctataattagtttgcattccctgagcactggctttctgactgtgcacagagccatccaggtgtgtgagtggtggggaaggaaaaggcagcctgagaagaatgaaaatggaggctccgtgactcacgatgtgctagagcttctggctgggggctccgggagaggaactcaagcgaatattgaaaaccaacctaccttccttccttccttcttttccttcttttttccttccttccttccttccctttttttccttccttccttccttccttccttccttccttccttccttccttccttccttcctctctctctttctttctctttacataattttagagcatctatgatgaaacaagcattgtacaggcattggggatattgaaattagtatgacataatctttgcgctcaagaagctcgcactggggagaatgatgtgtaaatggtaaactataatgtgacgcatgttataatgtgtcatggcaggcttcacagaggtgccttctgacctaagtctcagattcgggcagtcagtccaccagattcagtaggttggaaacacaggcatggaggggcattccatggaagggcgttctgtgcctgatcaaagcctggaggtggagaatgtgaggcttggaggagggagctggtggttgggttggtggagctgcaaagggcacagggagagaggactctccaagagctcagtggccaagggcctgggaggtagactctgagcctccttcggggggatgaccagctggcagcagtgatgggatctggagctgagtgggaggtgtggactgtggaagagattttggagctgcagctgtacagatggtagctgaagccagcccatagagagcgaaggaggagggcatcagggcattgctcctcatggaagccaggatctggaagagggggaggagaattgggaatgttgggtcatagaagtcaagggaggagagttttgtggctccatctgcacctggacagagaaagattgtgctggtcgccaagcctctgtccagcggaacccccttagcctgtggattctctgttctgttgcctttgcccaaggtctctgtttgttctgactcagtagcagttgctctgaggggatagctgctttggggaggcaaaactccctcctatattttagtgtaagctcctctcccttctcaggcgaactctccagggcctgcagctggatctgcccctggaggaggagacgttgtcccttccgagagacctggagagtcttgacagaagcttcaatggtctccttactatgtatcagaggaagagggagcagtttgaaaaaataagcagtgctgatccttcaggtgaggagaggggcacccggataaccccgggcatgggcactgccgtggtgggcatgccaccccctctccctcctgctcctcctccatctccattcctcatgcttctcgccacaggagccttccggatgctgagcacagcctacgagcagtcagcccaggctgctcagcaggtctccgacagctcgcgccttttggaccagctcagggacagccggagagaggcagagaggctggtgcggcaggcgggaggaggaggaggcaccggcagccccaagcttgtggccctgaggctggagatgtcttcgttgcctgacctgacacccaccttcaacaaggtgacttggggcatggagtcccacttcctggagcccacaccccagcttgtcacacaccaactgctgccacctgcttcctattagggcagatctgcccctgtgagaaccccactcccccagccatcccgacccttgtactgctcactgtgagctcagtggttgccaaggaaaccagtttctggtccttagctctcatggagatgtctggctgtttctggtgcttggttgtcatggagatgtctggctgttggtttcccaggtgtggggtgggattggttattgaggggctttgggtagcctctttaacaccgccatctgtccacagctctgtggcaactccaggcagatggcttgcaccccaatatcatgccctggtgagctatgtccccaagacaatggcacagcctgtggctcccgctgcaggggtgtccttcccagggccggtggggccttcttgatggcggggcaggtggctgagcagctgcggggcttcaatgcccagctccagcggaccaggcagatggtaagtgcagccgaggcggggtgggcacaggtaggaggaggcagacaggatagatcccccgggcaagtcagagttcccattttacactaaagtccagagattttaggtgacctgcttaaggtgccacagcaagtgcaagatagttttttttctcttttactgaacatccacatgtaagctgggttggttacaaatgcttcctaggtaggtcttggcatagaggatgatccgcagaatcgtggggctgctgagaggttcccttggggccttaccccttctgacctagagtgtatgtcaacagattagggcagccgaggaatctgcctcacagattcaatccagtgcccagcgcttggagacccaggtgagcgccagccgctcccagatggaggaagatgtcagacgcacacggctcctaatccagcaggtccgggacttcctaacaggtgagcccagtctccaccccaccttggctgctgttccagtcctgcctgtcccgcattcccatgttcagtgcatcagccagccctccctccctagtcccaggcctgcaacatccaggcctccacttctccttggcaccatggccatgaccttctcgttctcccgtctgccctccccacccactccaatcccttgtgacccattctcattctcaacacaacagctgaaatatctcttttaaaatgcataagtcagatcacatctcactcctgcttaaaatccttcagtggcttcaccttgttcttggaatgagctctcaactcccatcgtggctacagagcctggcctctgtccatctcttgggagtgaccttgggctcttctctgctttgttcactggctgtccttgaacatgtcaggctcttgcctgcttcagggatgtttatttgctctttgtctgcctgaagtcctctttccagggctgctgcttcttgtcctctgggtcatctccccagagaggtgtttcctgaccatccgatctgtttgtcccccatcatcttactttccttgcactactcaccctcattcagttgtcaacaagtggattgtcactccactagaatggggactccaggagggcaaggatggttgtctgtcttgttgactactgtgtcaccagcacctaacataaggccagacacagaaagacatctgacattggtggcatgaataaatgaaccagacacccttcctcactgctctggggagtgaggaagggctgtacaatggaaagatccctaaacaggacccgggagactcgtgtgacattgggcaggctgcttttctctttgcctcatcttttgcttctataaatggggacggtagtatttcacaagtttattctgaggatcaaataactgatgtaaaatgtgttttgaaaaaggaaaagtgcctcaggaacaagagttgatattgttagatttctggttcctgccaggttatttgcttggctgggagcccagttaatacgagcccagggcttggtgtaatgacagtggctcctcttgctactattacagtgtttttgccccagataggccgaagtcccctcctgagtgcaggtggcaggtcagagaggggcaggaaagttcttctgaggtctcatgacttgcataaggccttgaggcactcacctggggaaaatattacctggggatgtagggagattgtgccccacaaacgtggatgatgggggaggtcaaggtgtggggcttaggctcatggataagggattcttgcccctgagtcaagtccagtgaggctgaatggccactcatcctgcattaatctcagccagggctctggcctcagtgggtgggaggtgagttggaattctctcctgccgggtgcagctgaggctcatgtgaacagacagggagctgccaggccccttttgtcctctctcttatacttgtatctcaggtcaagtcttatgatgagtccagggtcagagagaaaaagcagggcctgagagaggcctggccccagggggaaacccaggaaaattttctgtagcggtgggcttggactctggtctccagagtcctggtgcagaagccactgagcgctggctgctgtccgatatagggtcacagtgtgggagggagagtggaaagtctgtggagggaggaggaaacatcgcctttcccagttcttcaaatggaattgacaaaatgaatagttaaggcttattaagttctaactgagtccaggcactgttccaagtgctttgcatgtattacatcatttattcctgactacatgaactaagtactcttattacttccactttgcacacaagtaatctaggcacagagaggttaagcaacttgcctaaaggcatctagcttggcagtggtgcaggtaggcttcaagcctaattgtctgactctgtcattcacaccctattgctttacggcatagacacacaaatacatacacacatgcgagtgtgcatacacaaacacactttctcttgcctcttgcctttgcgaatgtttttcctctctctggatcgtctcccctctcccacctctgctgacctgtctagctcctgctcatcctctaggaatctaggcatcccactctccaggcagcctccctggacctatcagatggcgctgggggccccttccatggccatcatagcacctgtgtttactccgctcactcaaagctgtacttccttgttcatgtgcctgtctcccattagatttccagctccataaaggcagggactgagtttaatttgatttgcagtctcaactcctcccatgcttttgctcaaagcagtaaatatttactgagcccatcctgagacccagaaggctctgcgactgaatgtcataccgattgaccctgaggatgcagctgaagtggtgcagagtaaaggaagggcaagatctaggtggggatgtgctcatcctggaaggctttcttgagaaggtgcacatgaagccttgttttgagagtgggactctgggttagaagagaggttgacgagctctattaggaaggtccttatgaaagcttgctgctgggataaacccacttaatgaaactcaaccacagttatgctgcatgcaagccccgagggacacagcaatgaacaagcatggcttccaccctccaggagtgtccttccacctggcatgggatggggcagggaatgagacctgtgtgaccagctagtatcctctagttgtagagtgaaactgggcctggggccccagaggagttcagattccagggcaaatcatctggtgagtgggtgcccccctccttaatacctcaataccagtgaaatctgtaaaagcaaattgggagagatggggaggagatgtcatctctgtacttctgaccttaccctctgacccagagttggtttgtaacaactcttgcaaatggattgtttcatgttgtaccttcagattggggattgatattcctttttcaccgatcaggaaactgagcttagaggaaccacttgacttgcccaggtggcttgaatagtaaagcagagatctgaacctgaagccctgtcaatcattcattcactctacgcacatgaggacctccaagtgccaggcactgtgctggggtctggggatatagctgtggacaaaacccaggccctgcccttgtagagcttacattctagaggaaaagagaccaaacaaaccagttaaatgagtacagtgtttggcacatgggtggtgcaagtgctagacagaaagataaggcagggagggacgataaggtgtgctacagtccagggtggaggttgcaattctagattggatggctggggttggcctccctgagaaggtgatattccagcagagacttgatcattcttatttgcctttgcacaaatgagcaatcttgcctgagggggaatgcagggaaggggtctttttgccaaggaagcagctccagtttctggccactcttcccaatttagggctgattgtgcatgtgctgcaggcattgttcagtaccagctgtctggcaccacctccttctccccagcccgcagcttcctgtggcaccagacacttagttggcacagctgtgacgacacccctcctcctccctgctgcagcatggagcacaggatagtcatcctcctacagcattcccagaaatccctggagaacaggcgcctgagtctggttgaaagggggcagcagctccttgggacaccacggtagaggggccactgtgggtgccttccacaagtgctgctcagctaggagaggcctcgtatctctggggaggttagtgggctcctacagtcaaatgcgtgttgtcttccagaccccgacactgatgcagccactatccaggaggtcagcgaggccgtgctggccctgtggctgcccacagactcagctactgttctgcagaagatgaatgagatccaggccattgcagccaggctccccaacgtggacttggtgctgtcccagaccaagcaggacattgcgcgtgcccgccggttgcaggctgaggctgaggaagccaggtatggccttgggccctgaacttctctctgcccaggattaagctggcgttttgctcctcaaccccgttgctgggagaggggtacagagggctgggagacaggagggggtgcttaccatggtggagagtggtacacagagtccagagtgcaggttaaacttaatttgcatgactgtgtcttccgtattggaaaccgcccagaaggtgtcttgggcataatgggaacattcatcacgtctgcttggtggggtcctgggacatcaaagctactgagttaatactttccttgctctttgccttggctgggaagggtgttcttttggactggtgtgtgagtcgaaccacacattgattcactgttcactcattctctctctcctctccctgctgcttctctcacccaggagccgagcccatgcagtggagggccaggtggaagatgtggttgggaacctgcggcaggggacagtggcactgcaggaagctcaggacaccatgcaaggcaccagccgctcccttcggcttatccaggacagggttgctgaggtgaggcattatggcttcctccgcccatatttgggcataaacaggaaaatttgggcaccaggcatagaaaatgccagaaagtgactagataaaacctgaggtggagttctagaggagagtgacaagctttgggcaggctatgggccttggattttctggtcttgtggctgggatgcagaaggaggggtgagaggtgggcaattgtgtttgttctggttggagagggtttttgctgcctgatgagttggagaaaaaatggggatgaaccccccgacctatgagacccaccacaaaggccagatctccctctttccacaaaggttcagcaggtactgcggccagcagaaaagctggtgacaagcatgaccaagcagctgggtgacttctggacacggatggaggagctccgccaccaagcccggcagcagggggcagaggcagtccaggcccagcagcttgcggaaggtgccagcgagcaggcattgagtgcccaagaggtacagagaaggcggagttagctcaatgatgtacggccagtgagggggtcctgagcagaggaggactttgcacactttataagaccacaaactcaaaagtgcttagaataacagaaccagaagaggcttgagagtcaacccaaacctggccaggcatctgatttctccctccactgcttttggtatagctggctcagggacactggagatgacctagtccagtccctttccttttacagatgaggtggtgactcgttcacaggcctaagaatcatctacaaagcaggtcccctgacactggatccagagcttgtctcttggattcccagcctggacagatgctctttgcttaacctaacctgggctccatgattgtcagaattagatgagagagaagatcaaagagcccattctcagtgtctcaagcacactacctgctcccgctatggccaggaacattggcactttcaatcctggcacagtgaccaagttgctaagtatgctattaagtgacagcctactattaatatcctatgatgtgactgacattgtcctgggagtgaggtgggtcatgtcaagagctggagatgggaagagggaaacacagaagtttaagtcatagtctgtggctcaggggtttcaataggcaaaaccaatgctattgggggctaataggaggcaccttcccactgtgtattgatttgggtgatatcaagtgctttggccacaggtctttaggaccttgcatgatgacaatgacactgagactattctacctttttcagggatttgagagaataaaacaaaagtatgctgagttgaaggaccggttgggtcagagttccatgctgggtgagcagggtgcccggatccagagtgtgaagacagaggcagaggagctgtttggggagaccatggagatgatggacaggatgaaaggtgagggaatggtttaggggcatggactattgggcattcatgaaggctggtcccacccaacccaaggcttctgaagcccgttcttattggagctagccgtgctatgggagtgagatcaaatgagattttttctgggcatctagcatgtatgaggctggggaatgcagagatggtcccatgacttgtcctggcctcaaaaagcttgcaattaatgggaccattttctctgtttttgcaaacagtggggtcatattttttattcctattgctttatgcttaagatgcatagaattatatttaacaggatgaggtggtctctgataggggttgaataataagagttctggggttcagggaataaataatttgagagagacatgttcagtgaaggtaagaaaagaagatttgagatgggcctggaaggatgtgtaggcctgggagaagctgtgaggaagaggagggacattaggataagggtgttgggaagccccaacaagatatgttctgacatagggacaggagaagagggttgctgaggagctggtaggaaagaagtggcatgaggtcaacatgacttgtccctgtgcctggcttctagtgtgaggatgaggagggtagatagctcaggaggcggtagggcacatccaagggctttgaatatgacagaaacataatgaaagtagctttcaaaagggttccaaaaattccttagaaaggagaacaggggctcctgggaactagagtcatcgctaagatatgatgatgggtgtttgtgacctccttcattagccttggacaactgtgagagcccagagggtcaggggcccagggataattaggagtgggagcctgctgggtttggcccctgccaggttactaagcatgggatggggctggagaggcatgaagctggaggggcaccactgctttagaggccagatttttctggaggggattcctctacacatgctacctccagttagcaggaggggaaggaagggttgggagtcttggggagtctcaccatcaactcctcctcctgctgctgttccatttgcctcagacatggagttggagctgctgcggggcagccaggccatcatgctgcgctcagcggacctgacaggactggagaagcgtgtggagcagatccgtgaccacatcaatgggcgcgtgctctactatgccacctgcaagtgatgctacagcttccagcccgttgccccactcatctgccgcctttgcttttggttgggggcagattgggttggaatgctttccatctccaggagactttcatgcagcctaaagtacagcctggaccacccctggtgtgtagctagtaagattaccctgagctgcagctgagcctgagccaatgggacagttacacttgacagacaaagatggtggagattggcatgccattgaaactaagagctctcaagtcaaggaagctgggctgggcagtatcccccgcctttagttctccactggggaggaatcctggaccaagcacaaaaacttaacaaaagtgatgtaaaaatgaaaagccaaataaaaatctttggaaaagagcctggaggttcaacgaggaaaaacagtctgtcccctcactgggtaaactcttgccactgtttctgtctcccatttggggtttgtggggactcctctattcaagcccatattttgctctcctctgttccacccggctttctgggcacccagatttagggagtctgggcccctctgccctagaacctgatggattctatccttgagagaccagagaagcagttttcatctctaagcagcgattcaacttcttgcttacagatggggaaatagaaatccagggaagggaaggaacgttcaaattcatgcagcttccagaggaaggactaagactagaatctatgtctcttggggtcttaaagagaagttgtaaatggatatgtgtggggggtggggtggaggatgatatggaatggcatggacatttgtgtgttaaccatggcccaagcaggcactgtgctagacattttatctacattaacttcttgatcattgttaatcattttgattatttattggccacgaggctgggcacatcatctgcatcatttcatgatgcaggtggcactgctattcccattggataagtgaggaaaccaaggcacgaaagactaagtaacttccccaaggtcacagatatggcaggtcggggcagagctggggctcgaactcatgctcatctaatagagccattaagagaatggccactaaagccagactgcctcggttccaacagaacctgtcccaaggggttgttgtgagaagtaatgagttaatgatgtaactcatgtccagtgcctggagcactgtatactcagctatatgcacatctgtatgcacatcagctacaactgctggttccttgctgaccccagccatccatgcactctctactccagacatgctcagaagtccctgaactgctcctgactttgaaagaaccaaatgaagcctcatagagaaaaatatgtccattttattaagcacaacactgagcatgaagctggaggggtggagggcgaggaaactggggaaggacaagaatggtgtgctggactttcaaggagagaaaagggaacagaggcaggattagaactcctggcagacattaaaatagtcaacttccaaggttaactccattgggtgtgtgcacggaggacatgtggccaggataagaattccttgcagcccttactcatgaacttctttctattccactttggagggtgtggcactgcttttagattgaggcagggagaagggccagaagtgtgctggctgggtctcagcgcacttgggagctaatcctggagttaaggattagaacttgaagagctcacaggcagaccaccatggggagctgcctgtcattcatgcagatgggcaggcaacgacattaatgagcccaatctggccaagaggttggaggcttgagaggtgggagtgagtgtgtgcagagtgggagtctgggtagatgctccatatggctttgcttggagaaggtgacacagcctggccagcccattaagcttttcacgacaaacagcacagacccaggcgagagctatctacgtacactgcacagagccacggcacgtagggtgtggggcatagagcaggcaggtcagggagacctggaagctggtgggcaccgcttctcctgctcacagcttcaacaaggcttctacgccttggggctccctcctgggcctcctatgaggggctgccccgctggcagcaggctggtgcttctggccagaaactgctcctgctaagccctgctccacttgctctgccttcctccctctgccggatagacaccaggtttggaagagcagaggagttgaatatgtctcctgcaagagaaaggggctcagagtgaggagggggttgccacctcagaccccatcactcacactctggcatggggctctcctctgggacagaaactctccccaagcctcacactgtgaccctcctaacctgaaaattgcagtgacataggcacaggctccaggaatcacat

SEQ ID NO: 765 - DNA, 65641 bp, Homo sapiens
gggtgatgtctctgcccaaaggtctgagctggccacttagtgctgatccaaaccagcagagatggttttgtcaggcctggttttatcacacaacttatgcaaacactggtatgtttccagtggttgctttgaggttgcacatttgaattaaagtatctgaattatgaaatatattcttttgagattttctcttttttatatcagtttattgagacattttgtatacaatccaattttaagtgtacaatagagtttttttttgtgtttttttttcttttggagacagagtctcgctctgtcggccaggctggagtgcagtggcacgatcgatctcggctcactgcaagttccgcctcctgggttcatggcattctcctgcctcagcctcccaagtagctgggactacaggcgcctgccaccatggctggctaatttttttgtattttttttttagtagagacggggtttcaccgtgttagccaggttggtctcgatctcctgacctcgtgatccatgcgcctcagcctcccaaagtgctgggattacaggtgtgagccaccacacctggccttttttctttctttttttttttttgatacagagtctctttctgtcgctcaggctagaatgcagtggcatgatctcggctcactgcaacctccgcctcccggattcaaacgattctcctgcctcagcctcccaagtagcagggattacaggtgtgcaccaccagtcccggctaatttttgtatttttagtagagatgggattttaccatgttggccaggctggtctcaaactcctaacctcaggtgatctgctcacctcagcctccaaagtgctggattacaggtgtgagccactgagcctcaccagcaattgattacttttgaccacagtaatatttctttcatcctccagaagtatcctcatggcccattgcagtcagtccctgtccctggcaaccactgatctgctttcttgctttgtagttttaccttttctagaattcatttaaatggaatcacgtagtatctgggctcttgtgcctggcttgttttagcacaatgctttgagattcacccatgctgtgtatgtatcagtagtttattcctttttgttactgagtagtattaagttgacttttgtctggatttgaaaaaatatatatttatttgggccatatggaaaagcaaatagatttttgtttttgcttttttgaaaagccatgtgttaattaaaggtaatcctaagaatacatttaaatctttacctttaccttttccttgaaatgtaagatccctacctgtctgaaagtgaagttttaaattcacaatttttttttttttgagacagagtcttgctctgtttcacaaattttgaaacaggctgggcacagtggttcaggcctgtaatcccagcactttgggaggctgaggcgggaggatcacttgaggtcaggagtccaagaccagcctggctaacatggtgaaatcccatctctattaaaaaacacaaaaattagccacgtatggtggcacctgccaccaatcccagctactcagaaggcttaggcaggagaatcggttgaacccaggaggtggaggttgcagtgagctgagactgtgccactgcacttcggcctaggtgacagagtgagactccatctcaaaaaaaaaaaaaaaaaattgaaacatttggtaagaaaatctgtatgtgaaggaaatttccagatatgcagcaaaaatatgaaataattaatagcatccaagtaattattggtaatacgggcatgaacctggattaggccaagagttccacaaaattgtaaaataatgattcaataattaattagatggattgaagcaaaaatttcatctttctcatatggtgtttgttagtaattttaacaacagaaaaatgattagtgctcactcagagataataataatttttaaaacaataattattgttcttattatggctatatctgtatagtacatattatgtgcctggtgctgttctgagccctagataattcattaactctaataaccctactaggtaagtgttttaatattatctccattttatagattaagaaactaaggatcacagaaagcaaagtaactgctttgatgaatagaagccaggatttggccctgggaacctgcctaagcctcaacttttggccactagaactctcttaacctcaggaatgcactagagaagaattctcagattggtaaaaggggtcgatattgtccctgagcaaggtaagggatgaggccagagcaggggcgtcaagcctgagccagacagttgtttggatgtgtggagaagcccagaataaggcaatgtgaagaggtgggaactgagaaaagttggggagtgcctgccttaaggcgtttacattttaaaaatatgttttaaatcctgcactgttcacataaaagaggctgctggtgggtctggtgcccaggggcctgtgcccatttgctgcccctggtccagatgacctctggcagtccttccagaactaacatcttgggaaaaattagaaatatttgttcagagtcttttgtgacttgaatttatcgatgtaggccaatagtctacaatctggctaggttataatggtcattgataaataacttttgattgcatgttgaattcattcagtgttgtgaatttgtctttgttttttatggtactttttaatctgacgtaacaaagagctaatggattgtggagtcatatggcctggttttgaaccttggctttgcaacttactagcagtgtgactttgagcatgttacctgactttcgcatgcctgtgttttcttgtctgtaaaatggggaaattaacagtacacctaattcataaagttgttttaaagattaaaagtttaatgagataatggatttacaacagcgactggcaaatagtaagcattacttatgtgtttgtattgctattatcactgtcccaaaatgatgctagatgaaaacatctgttccaacttttaacatataataaactatagcaatctgcactaaaatgaaatcttccttcaagactttattttgtagggccctgttccttgttcctgcaggaccgtggtgaattgcacaacaaagatgggactcagggacaggacctcagcctccacaaggcaccagcgactagaagggaaaattctaaataccgtctctgtgaactgaaaccttagctgtagctggagactctgagttttgagagagaagaatatttgtgtaatttgtttgaatcctgggcagagtagaagagaatcaagccttggatgagaaagttggagtttcttttctattcctcaggttttattgctggagattttagaataggtgtcagccagtttgcagcaacctgtcttgcccctaccattcttgggttctgtattcagaccccagctattcctaacacccagttcatactccacgttctgtacaaagccatccctagctatcccagtcagcccacactggtctccatgacatgcatgaaccgaagtttttagaacctttgacacttatgtctgccctggatgatttgttcattatcttatgttgttgtcatccacagaacaatctggagaatattcatatatttagtcagcaaatagctatttattgggggcctttgtaggcctcaatgttgagaagaagggttggttgttttggacagattgtgtatttataaagctctagcaatttttaaatctctagcaggaaccaaagccttcttgacagccacctctctgaattattgtcactagcctccttaggagaagagacaatatagtttataccaagatttgcagttgtctagatattactcacttcagctagcactgtgctagtagataacattcaaagttggtctcaacaaatattttctctagtgcccatggagagtggctgagaaatacactctaagatgtaaaagagtttggtatctagatcctctttcttattcatttcaagccaatatttattaagcaccaactgcaagctagatactattatagttaggaatataaagtgggccagggatggtgtttatgcctataatcccagcactttgggaggccaaggcaggaggattacttgaggccaggaattcaaggtcagcctgcccaacacagcaagacctcgtctctacaaaaaattaaaaaattagctgggtgtggtggcatttgcctgtagccctagctactcaagaggctgaggtgggaggattgcttgagcccaggggttggaggctgcagtgcgctatgatggtgccattgaaaacaaaaacaaaaaccaaccaacaaacaaaaaaacaaacaaaaagaaaacgatactcagtctttatagggaggttggccagtcaataggttactttatgagttgctaaccctggtgagcaggaagttatgtggaccaggagagaaacccttggttcagcctggagaaaggagaggttgaccctaaactggagggtggagaggaccctgttgtgactctccgactgacttgtcttccttgatgtcctttaagccggagctgattcgggctgctgccttatttctgagttagcgctcttaagattgggcctcccagtttgaggaaggggcgggctgctgtctacctctgtgaatctgccctggaccaccccgggagagaaggagggctccggggaatctcgcacattccaggcaaaggctcccgggccgcagcctctgtgccacacccttggcccgggccaggtgtgcgccctcctcgctgcgagggggagcgggcggctgcggggagcgattttccagcccggtttgtgctctgtgtgtttgtctgcctctggagggctgggtcctccttattcacaggtgagtcacaccctgaaacacaggctctcttcctgtcaggactgagtcaggtagaagagtcgataaaaccacctgatcaaggaaaaggaaggcacagcggagcgcagagtgagaaccaccaaccgaggcgccgggcagcgacccctgcagcggagacagagactgagcggcccggccccgccatgcctgcgctctggctgggctgctgcctctgcttctcgctcctcctgcccgcagcccgggccacctccaggagggaaggtgagtcggcttccacaaggaaacatctcagccctgggctgagaatctgcctttctctgcagaccgtgatggctgaacgtacctccgaggattcccactttgtccagaaacttgttagagctcccttctcctcccctatctggggctcctccagagacggattttaaatgagactaatatataaagctatctgctttttaaaaatagtaagacaataagctgtgacaaaagagggtcttccttaccttaaaaatgttccttcttgatgtcttttttcgaccaaggggccgctatttaatcaataatgtgttgttatatacgttctttccccagcgtgtgcttttattaaaaggttttggtggcaatgtttcccatgactgtgaacaccacaaagattgcaaaggaacctcttcaataatcctgtaattgatgtttcaaatttcggatggaaaaatgagccttaatagtattagcaatacccttaacttttgcatcacgttacttttcatagtattttcatgtaatattcattcaacaggcacttactgggcacctgtgtcatatatcatttgatcttatctagggcacctagttggctgtcatgtgttagacgttaagttcatgtaaacaaaactttgtgagaacctagcaactcttaactgtaagcatgtgtcagctatggcaacattttatgggtgttttccttgtcacttagttctatggatatatgcctgtataattgccctgatgttttatgtttatattgcatcctgcatctgatggcgtttcaatcattctttcaataggtccaagaccaagagccatttccacacaagtgcatgcatgaatatgagataatgctcacatgcacatgcaattgtataagccattcccaatattattgtgcattccgggtgatgctggcctgaattggatttgagtggcatgaataatgtttgagcatgtgtttgaatgcaatgctacagtcctttttgtctaaaaaagtcttggaattaacttccaacctatcatctctgactaccattttcaaaaccatgtatgattgccaccaaaaaaaaaaaaaaggtggagataagtatgtgaaataatgaacatattaatttgcctgactagaatactattttactgtgtatatcgaaacatcatgttgtataccttaaatatatatagttttaaaaagtgataaataaaaggttctgaaaatggtcatgaagggtatgttctcttagggctgggataagaagtctcagcctaatggaagacatccccaaagtaaaaatagtctctgaatattagaatttaaagggactgcttatggatcaactacttggaatctcttgatttgaaaaatgagaaaatgaaaatgtgtttctcaaggccacacaggcagagatgaaactggctcttgatccaggggctcttaggctggagctttttgagccacattataaaagtaataaaggaataagatacatcttttatacatgataagtaatcatttaagcaattttcttgttggctatagttgagtacatatatgtgtgttagcattagggaacaaaaataaatatataggatgctatcaatgctattttaataaaatcaggcttaagaggacagagctaggattctcacttcttaaagacataccagcttctgggcatccatctaccccaagaagtcagaaataccactgaggctcattgccactttccccttccctggaggcagactaaggttttattctccctcctcagaggccttcatttttggattcaatgggaatgtgaagtttgttgccagggtagaacacacatgctttttcattcatgggatgctgggatgtgctagaagttggactgaaaatatggtatctgccatgtctcaaagtgaccgtgtctgagtgtcctgtgggctgcacatatgagaacctaaagcagtgatgttgcttcctggttgtttccttgcagtagaaattatggcaatagatgaaattggcaagacttcagggttgggctcagctaaagcacaggctttagagtcagcctgacctggctttacattttggttcattcacttactagttccttattagtaatacttggtgtctgcttcttcattgtaaaatggaggcaatagtacttcaaccttgtagagtttttgaaaggatgaacaattactgtaaagtgccttaaaatgcctggaaccacatttctttaaaaagtccaaagccaacagtacagtgtagtgaattcatttgcccagagatcagaaagaccaaggctccccttcaggataggattgcctggtgtgagataaagtggcatgtggccccagtggtctggatcttagttcatagcaggaggtatgactggagaaggattgagaaagagataagaaagatactagaaacgtagccaccaatatgcttgtgaagggctttatgtgccaggctgttcagtaggatggtgccctgtaggcaaagaagagctgtgaatgatttgtaagcaggaattagtgtgactggattcatgttttagaaaggtcactcactcgagggcttagagaatgaagtggagctagggaagccagataaatggtgattaccgtaattcaaatgagagatgatgaagactttcatcatggtaatgaaagcaaagaggaaacagattacagggacatttaggaggtgaaatctaaagaatgtggtgatccaataagtctgtgtgttagggatatgagtataggaaagttgagagaaataaggaagagtccaagatggatccaaggctttaggtttgtacatggttagacagtgatgccattaaaggatgaggactataaaagaaggatcagtctgggcacagtgactcatgcctataatcccagcactttgggaggctgaggtgggtggatcacttgagcccaggagttcgagaccagcctgggcaacatggagaaaccccacctctaggaggctaaggcaggaggatcacttgagcctgtgagggtgaggctacagtgagctgagattgcaccactgcactccagcctgggtgacaaagcgagaccctctctttttattttagtttagaagggaaatttgagatataaatttgggggcccagaggtagaaagcaaagccttgaccacagacgagattgcctaggatatggaggtaaaagaaacctcagcacttaaaaaagagatagaggaacgatggagcagaatcaggaggaatgagcactgaggatagaggaaaatcaaagaagaagagggttttgttagtcaaaggaagactgtcagcaacatggcagtaataactggtgttcagatatccaaatgtgtatatacaaagaatgaggactatcactgctggatttagccgtcaggtgagttttgaagcaattgttcttccagaacggcgaattcagaatccatgattatcatagatcactaatttggtttttcccatgccctgatgctagaaaaaagatgctgtggatagtaggaaggatccttggaaatgtttatgctccctcgtagattctgttatttaaatcattgaagtggtatagcatcatacacaaaagtgcaggctctggagtaagactgcctgggttcaaatcccagccctatcatgtaccattgtggcacatttatattttgggacttgggcaagctacctcacctgttacttagctcctacatctcagaataaggatgataaatcgatatgaccattacacaaaaatcactttgcacattgcctggtaagcacttaatacatgttaatagattactgttattgttacaactaactgccctgccagtactgaatttggtatattgctttctgtgttttaagtggtaacatttttgaagggcctcctttttactctcctttcgtcagcccaagaaggtgctgaggagcctttctgctcaagcagacatgagccccaagttttacccaacaaaacaggaacccaaagcaggttgcagtttcaagactggatctcgtatcattccttctccttgcctttttcatccaccagacctcatcacacacagattcagcaaatctattgcttctcaaaacatgctcaaatataagatgaccctacaaagatcatctctcatttcccaatgggaagaacttcccccacattcaaagaaaggatttggacaacttgattatgagaacatttagcaatacagatgtagtagtcaaatgtctctttatgtttaatttagtaaattaattacacagatatattgaaagtcacataattgataaaatattatacttagaagtgttgatttgttcactcacattttatgaagtaattatattcaaattatattcagttatattcatctcaccagatgacttgagatacagtactgtttgaatctgtttttgatgtggtcactggaaagtacatcattttcaaaacatttaaaagatagacaaattatcccttagtgtatattgtgatcttcacagcataatcactctgaaaggcttatatgcaacacctttcagcactcacaactatgaagaaatgcaccattatgagaattgtttagacagctgggcccctttcttactgataagtctccaatacattgattgaggtcattttagcttaatgtatcttccccaaacaatatttttacaataaagtaattgagaaagtaccctataatatgcaagattttgaaaggacttaagtatgatcttttttttcctgagggataattttggaaaaattaaaacctctaccttatattcaagcatgtacagagatatagaattgggttggaggtgggctggaaattcccatatgggcttaaattctgggtgttctaaactgggggcagccactggttcagcctcactggcccaagaagctgagaaagattgttgatttgtgattcgtgtttatgggaaagtcagggcataaagttaaggtgttgagagaatcctgggaatatctttcccatttaacccacttaagttcttaatggttcaaacttactgactttttttttttttttttctgtcctagagaaatttctaagggcaagacttgaatcatctattagagatcagtgtagagggctgggtgcggtggctcatgcctttaatcccagcactttgggaggccgaggcgggcggattacctgaggtccagagttcaagaccagcttggtcaacatggtgaaaccctgtctctactaaaacatacaaaaattacctgggcatggtggcatgtgcctataatcccagctactcaggaggctgaggcagggggactgcttgaacccgggaggcagagattgcagtgacccaagatcatgccactgcactccagcctgggcaacagaatgagattccatatcaaaaaaaaaagagagatcaatgtagaaataggagctccatagaatctggaatactctcatttagtcagaaattaaacctagtaggtgactgaatcattactgggctatgttttaatataatccccagataggtgatgtaatgtttgaatcatgtccaaagccaaaggctaagtcttttctgtctgtgggtgactgtatgtctgcatatgtaattccccaaaaagcatctgcttctttatgtcacaaccatggaaacagaagagaatggttcttcctccagcactgatctatggaagaacctgagtctttcccttctgttgtatcaggtgaggggtggagatcaattggccaaacgtatagggatcctgcacttattcagggcttatatttacagaattctaaccgcgtctttttatttattgtggggatatgtatctccgcattagaaaagaatcaaattgcagccaaatcatttcccacaactaacttaaaacttggacaaatcatccaaatgctcagctgcactgatgtggggcatttcatacaaagtattttatgtttcaccatgtttttctcttattacagtatcgtagaactaaaatgagagtgggcctcaggggttctctacaagagcctctcattttatgcatgagaaaaatgacacccagtgaggtaaattaactgcccaatttcttactgttggtcatagcagagctgggctccagcatgtttcatccttttataggtaggaaaattgaggcacagaagagtgactgctttgaccaaggccagatttcagttactagtttaatgttctttttctgagataactccttggcatatttctcatttttctttttttgagatggagtcttgttctgtcacccaggctggagtgcagtggcacgatcttggctccctgcaacctccccgcctcccagcttcaagcaattctcctgtgtcagcttcccgggtagctgggactttaggggtgcaccaccatgcctgactaattttttgtatttttagtagagacggggtttcactgtgttagccacgatggtctcaggtctcctgacctcgtgatctgcccgcctcggcctcccaaagtgctgggattacaggcatgagccactgtgcccagcctgaattttcattgaaactaatcttcaagcttgatggaacctttatctactgttgacataccacctgtatttctaatgaagacatctatctcgtcttttcagaagtctccatttgtgtatatgattcaatatattggcctttcctttaaaaatatcagagaacaacaggttaaaactaagcacagctctagtttgtggggcattaacaagagaacagatttcaaattaccaagttttctcttccttttgttccactctgttgtcaggttatcatgcagcttggaattgaccaagtggctcagtttaggatcgttgatagtactgtgataagactttctcttttagcaatcattgttctttaatgactgttgacattttgcatctgtatatacgtaatcacgtccagagattatttctgtctccctgctacagacccttgtaagttttggagtctttcagaaagaggtctgtttcatggccagaatgttgaccatgtaagctttatacatacttactgctgtttcaaatcatggcccattttgctcttggtaaaaggatactttttggtaggggattcctagtgtttaaaaatcgtttttcatcccaaatagcctggcctactttgggaaggcagttgatccaacagtaatctgaagctgctgctcttgccctatccaggcagttgtaccatggtaggaggggatcttcacattctgagatctgcagggagcaggggagaggccacagtggacctggcataggaagtagtagtggagaaacagcatatttgttcaactgagatgcaagatactccctgatgtagtcttcatggtccagtctcttctcaaaatgtttgttacttctctttatggatgtgtaaaggtagtttggctcataagagctcatttaattcattcttctgactttaggcaatacagtgtttttgtttttgagatggagtctccctctctcacccaggctggagtgcagtggtgcaatcttggctcctgggttcaagtgcttctcccatctcagactcctgagtagctgggattacaggcgcatgccaccaggcccagctaatttttatatttttagtagagatggagttttgccatgctggccagcctggtctcgaactcctgatgtcacgtgatctgcccaccttggcctcccaaagtgttggaattacagatgtgagccaccatacccagccagcaatacagttttaattcatcttttttctgaaaaaaaaaaaaaaaaatctgtaagtaagatgctataaatgcacgccatgcatattttcccaacattgcaaatgcacatgaattaccattgttcttttgtgaagactaagaactatataatggtatgtaagcccacacacatacctaaatgcttgtatttttgtgaagggatgtagtgatagcaaaaaatctttgcctaatctccttgtacaaaaaaagtattgttcacaaaagcagtaaggatttaaaaaggaagatttattgtttttttttaaggaatcaatgaaacataaatttaaataattgaaaaatcatggtttatacttcaattatctccaaaaggcattttagtacaaattagaatctcctttttaacttctctttattcagacacatcatagaaggtttctttccttttggtcctctttgcttcaggtatttacctctggcatccctggaatctctgattccctttatttcaactgcttcttagaggggcataggatacctttttctaggccatgcaagaaatgtccagagaacactatgctctttgaataacagttaaatgtcctttctatgctggaatgcttttctttgtaggtaacttcacagaaatgtataaccctttatttctgtggtcagaagagtgtggagttccatggaggtggttgctgtcatatagaatcttaccacaatcacttcctgagtctatgctgcagctgacagcagctgtcttgcggtagagcctttgacagtgccagctataactctaatgtcctcagtttgccttccctttcacctgtgagcttactcagactgaaccctcagttttacctttaccctccactcctttgctagtcagacaaaacttggtgtccccagtttccctgttcactgggactttcttccccctcctcattgtctgcctgggcactggtgtcccagtggagtgtcaggggaagacatctccaggtgtgaactcctgatggagtcctcaccaggctgagtcatctacagttcacacgggtacattcccaagtctaggctgtgatataatgtactatgaactctcggtgaaacaggtgtctcctctgaagccataatcattcaaaaggaaatggcagtgatctgagtttcactgactcttgatgactttggagtattcagagttgaaaaaactgacccatactttatgattcaaaattgcctgtgagattagagaactgagctctgtcattcctctcatcctagcacttcctgcctcagccttactcacattgcttggacatttaaatgtcaactggtgccgtgccctttatttaaatgaaacaaatggatcaggcaggatatggtatcagttttctggctgtggtggcttaaaatgtggctatgaaaaatttgcaaaagaagcctaaattcagctaaaagccttagtgagagaagtaccatttcagttttcttattctaattagggaacatattgtgacattctttaagaagataaaactagaagcagatattcacacattaaacaatgaagttcaaggccagtttaaatgatgaaggattcagattttgttttaaaatatctgcttaagccgacaaacatattaaaacttggaaagaaaaattccatgtaggaggttttaaaactagaaaagtccttataagcattttcatcatcacatgtaaatataatataataaaaacattcatcttttcatcttgaatgtctcagacttgaagacatggatttttgcaaagaggatcatagcttctgatgcctttgatatcaaactgataaatgacaggtagtatcttgctttagattgcatacataatatgcaatttgaatatttgtcataattatttatttttgataaaaatgattttttttttttgagatggagtttcactcttgttgcccaggctggagtgcaatggcacaatctcagctcactgcaacctctgcctaccgggttcaagtgattctcctgccttagcctcccaagtagctggtattataggtgtgtgccaccacgcccagctaattttgtatttttagtagagacacggtttcaccatgttggtaaggctggtctcaaactcctgatctgaagtgattcaccggcctcagcctcccaaagtggtgggattacaggcatgagccactgtgcctggctgataaaaatttttaaaatacattaggataaatttctatttaaaggaccctttcaataattgcttttgtactgagaacaacctttgctagatttttaaaagtgggtatatgcaactgaaactttattcaccatcttcagtatagccttttacatttggacttcccattgaaagacctcattataggtgacttcatggaggcaactgttgctatctttgaacataaaagagttgtcagtttacatgagagcagtcttttgactcagaagaagggaatggtatccaataaggtatattaagatttagtttttagtgtaacttctttgaaaaaatgaaataggagactagttgagattgtcagccccaatttgtgtctgcccaccatgatggttttcttttataaagcaagaattttaagaagcagaggaaatgaagacataaaatgaagtgtatgtgaatgaatggaagagagatgaagatgtcccagtggtgagcgttatatgaaattaggctggaaaagtagatagggtaagaccatgatagtccttgtaggcaatattgaggaattctggtgcttaacttcaaaggaaaggaaagaaactacagaatattaagcagagaagccatgatacaatttgtattttggaaagattttctgattgctgagtggagggaagcaaaagaagttgcagggaattcagctaagaagtgatggcaggcaagagatgattgaggtttggtctagatatggctatagtggagatggacttgattggatttgagatatttagtgggttatatcaacaaaattcagtgttaaataggcaggtgagaaagatggagaacctgtaaggatagcttccagctttccgacttgaaggcatggcaatcataagtttggttttaaacaggttttgtgtaaagaacttttgagataaccaattggaaatgtaaagtgagctgggcgcagtgactcgtgcctgtaatcccaacactttgggacggtgaggtgggcaaatcacttgagatcaggagttcgagaccaacctggcaaacaaggtgaaaccctgtctctactaaaaatacaaaaaattagccgggcgtgctggcgggcgcctatagtcccagctacttgggaggctgaggcaggagaatggcgtgaacctgggaggcggagcttgctgtgagccgagatcgtgctactgcactccagtctgggcgacagagcgagactccgtctcaaaaaaaaaaaaaaagtaaaagtaataagtaaataagtaaataaataaagtggatggcagacatgaggacctgaagttgaggatgaagtttgggccaaggaagtatcttcggatgtcaacaattacggtggttattgaagtccttgtcatggatgagattacccaagggagactcagactgagacgttgtggagattaaggagccctgaggagcaccgacatttagagtaggggtaaggaaaggagccagcaaagccttgaatagggaaggtcagaaggcagacagacacctggcagtatgacatcattgtatccaagggaagagagttgcacaaaggaaggagggaaaaagatttgatgtctcagaaagagaatgagggacacatgcaggaaaggaaacacagggcacatccctttcctctaaataagaaagataattgagcatcatctttttttttttctttcttttttttttttttttaattgagacagagtctcactctgtcgccaggctggagtgcagtttcgtgatctcggcttactgcaacctccacctcctgcgttcaagtgattcccctgcctcagccaccccagtagctggaactacaggtgcctgccaccacacccggctaatttttttgtgtattttagtagagacagggtttcaccatgttggccatgatggtcttgacctcctgacctcatgatctgcccgccttggcctcccaaagtgctgggattataggcgtgagccaccgtgccgggctgagcattatctttaaatggttcatagttcgactaattcacgggagattacaggtcacatcatataaacttgctgctgtttcactgaatcagttttagtgcactaagcaaccgaaatggtagcaacagcaacaaagcactacgtaatagcaaccagcacacactgtcaggtttaaacatgatgctcaaattcctagctcctgacaccgtcccacacagccgccaagtacactacctatcaaggctgcctgagcactgcaaactgatctcatgctctgaggcctgcctcatcgccttgccctcctcccacacagccctaggctcgctgcccgttgaggtggcaggcagaaagcattgcagctctggggtcatagaccacagatgggtgggcagtcctagggtggaaatagttcatctggtatgagcagcaacctgaaagtcccagacccttaatctcattgaaaatctcatgttcctctcacaattctttctgttcccatctcaccatggatttttttgcttggaacattagtttttttacactgaatgtcatatatgtagacaatggaaactttgtgtaatgtattggggaaatttgaaagtaggcttctggacgtcagggagatttctgtatgttcaggttcttgttggcttttctttttttttttttttttttttttttgagacagagtctcgtactgtcacctaggctggagtgcagtggcaccatcttggctcactgcaacctccgcctcccaggttaaaggattctcctgcctcagcctcccaagtagctgggactacaggcttgcaccaccacacccagctaatttttgtatttttagtagagatggggtttcactatgttggccaggatggtcttgatctcttaatctcgtgatccacccacctcggcctcccaaagtgctgggattacagacttttcttagagtcagactgcctatattccttccttcctttctccttccttccttccttccttctttccttccttcctccctccctctctttcttccttccttccctccctcattccctccctcaattcctttctctctccttctatccatcatgctatccaccatctttccatccatccatccatccaagcactgcattaggtacagtggggatataaggtgagaaatgctgtagaagaagtaagtcatagacataaacagtgatgacacaggatagaacgaggcaaatgctgagagaggtgaggatgaagtgctctgggctttcacgggagagagaagctgccagaaggtatccgcaaggaagtgcacaatctgatttatgcacctaaaaagaagactggctgttacctggaaatagatttagggagggtggaagcagggagtgctcctgataaaggaaatagcaagcctaaaagccagaggtgggaaagggttagtgcagcctagatctgtgcattggagcccagtgaactcttgatgaggtaaagttggaaaggttggcaggggccacatctgctgagttttgaaagaagtttggatttttaattttgtcattaccgttaaagcactaaaaagcatgatgatttcacagattatacaaagacagcgattagatcaccttagtgaaaagcagagcatgtttttcagtttagaacaatagaaagagggccgggcgcggtggctcaggcctgtaatcccagcactttgggaggccgaggcaggcaaatcacctgaggtcaggagttcaagaccagcctggccaacatagtgaaaccctatctctaataaacatacaaaatcagccgggcatggtggtgggtgcctgtaatcccagctactcgagaggctgaggcaggagaatcacttgaacctgggaggcagaggttgcagcaagccaagatcgcgccactgcactccagcctgggcgacagaacgagactctgtttcaaaaaaaaaaagaacattagaaagaggacctgcttatagaaacacaatcatatgtatgccaagtgattgaaatttctcgtaattgtatgcctcaaaagggcactgtttcttatgggaaatttaaaatgagatcccgatgaactgctactactgatgatgattatttcaaggccttgtcctgcgtacaacctgaggaaatattttctgtttccttttattctcctaaggccacagctgggaaaccgcctttgcccctttgcttcctgtcctaacctgttggagctgcgtgttttagtgaggggtgggagtgttgtgaagtgagcccgagggatcctgctcgcctcactctattgtttaaggaggggctccagctgctttgatctgcgtctctgggtgagtgtgggtggtagtgggcagtccagcctgtgtctggctgcctggcggtctttcctaagaagcaccttgagggtcagcaactgtgtgctattatagttattattataataaatgcttcagtgccagagaagtagcatacagcagtcagacgcaattaccatccacgcacgctttactagacttaaagaaatctgtgaaaatctgactcaaatgactccgtttcagatgggtttatgtaggacttgaggtaaacttgcagagtctcatttctttggctgtggagagaatgctggctggcagaatcaaggatttggagggagctggagtgagggggcagaaagaggagaggatgaaaccttgaagaagtgtccctggctttgtaccaatgaatagtcaaaggaatgatggatgggacctagaaccagagttcagtgaaagatggagagaaacctgcttgttttgtttactgaccttagaatggcttcagatctgttcagggtttgagtctgattttttaaattttattttccgatgatgtgcaatatcttaatgccagatcccgaacccatacctgggttccaacacacaaatccttgcatgagctctagaatatactgagctttttcccaccttgggcttttaggcttgctctttcctttgtcaggggcactccctgcttccaccctccctaactccatttccccataacagccagtcttctttttagatgcatacatcagatcatgcactgattcctgttcaagtaggaaaacatggataatatgatacatgcttgacacaggcaaatatctttggaaaaataaaacattagcaacccccttggctgggtgcggtggctcacgcctgtaatcccaacactttgggaggctgaggcaggtggatcacttgaggtcaggagttcacagcctggccaacagggtgaaaccctgtctctactagaaatactaaaatattccattgtatttcagaagattataaaagctctaaggtgaattttgaagtcttcatcagcatatccatattaaaaggagatgacagaagccaaaataaaagaattatgggctgacaggcaactggattaaaataagcatcagtttcattaaaaatggctaacttgaagataaatcttttgactccagcactctagaggatctaaggtgaccttgatggacagtggaagaaatcacaacatggaactccctgaataaaaatttattgacttaaaaaaaatactaaaattagctgggtatggtggtacatgcctgtaatcctggatgctcgggaggctgaggcatgagaatcgcttgaacctgggaggtggaggttgcaatgagctgagatcacaccactgcacttcatcctgggtgacagaatgagactgtctcaaaaaaagaaaaacagcaacaacaacaacaacaaaaaaaaaaaaacaaagaaaaccacacacacaaaaaaattagcaaactccttctttgaaatgttactggctcataaagtctgattgttcaagcatgcagtatagcctccctattagatgtgatgtttattaaattaataaaataaatatacatctcattgaccaaggataaaagaaggaagggggaaagggggcttaaatcagcaaaacaaaatctaccgatgaggtactttggaaataaagatgatttatcaggaaagagtaaaagaaaatctgcaataaagtgatacagacaaatagtttgatgtatttgttatgtaaacaattcataagaaaaacattgtgccataagaaaaacatagataaatggacaaagatcatgaagcagacaattatgaaaatagaactaaaacagcaaactggcatatggcactttctaccctccttcccacccatcttactacttcccaacttcctatgcctttccactgctttatatatttctccctaacaaataccactatcctaatattctctcttgatattacttatttatcttgtttattttctttccccccaaattgcatgtaaactccgtgagggctgggacatctgttggttttgtttgctactgtatgcatcccattgcctagaactcagggaaggtccaagacaaccatctatgggttttttaaagttcaacagaacattcattcattcatttgtttgttaaaaaaagactaaatgcctaccatggaccaggcactgtgtgatataatagggcttcctttttcctttttcaaaagcatgagatgtgttttctacctgttagaactgcaaagttgagtgcagagatttgcctgtggacacagctttgtttcaaaaatatatatttttttaattttggccaaaattttaaaaccaatagatttcatacacaaagctggatttctgtcttcttttaaaagaagagttgatgttgactacaacaggcatcaattgcatgtggctgcaactggcagggggtgaagtgctgcttcttacgccctttgggcagaatccccaccacttcctgttgccttactctaagcctggcagtgccctttggcaactggtagttgccaaaccatggtagtagttgggcaggtattggtcacagaataaagaccacatacaagctacattacaccgttttattaagcccagttgcaggaatattctagaattttaaatagaaaagttgtttcctgccccccgccccccctcacccctagtagcgagagtaagtaataaatggttttagggaagttagtctcaatttgggagatggtttgagagagaccatttttcaaacacattaatgatgaaaagcatcattccatgcaaaaggagcttggaacaagctctcccatcattttcttggtgggaccatttcaaagactcaatactgagttaagtgcaatatagctgggtgtttaatctcagtgcagcttggtaacttcaaagtcctgcaggcaaggctgtagagagtgtcttcacggagttctcatgcaatgcagatacccaaggccaatacattccccagacatgaggcccatacatcccctcactctagatggcattgcccttggctttaagggagacccatttgaaaggaaaggggtatgtttgcaataggcttagaatctgttgggcaggctctggaggggagatgctggctaaggacctccatccctggaaccgtaatgcaactccattgaaggctgtgcatttaaaggacaatggggcaggcatggtagctcatgcctgtaattccagcactttgggaggctgaggtgggaggattgcttgaggccaggagtttaagaccagcctgggcaataccacgagaacctgtctctaccaaaaagtaacacatttagttgagtgttgtggcatgcatctgtggtcccagctactcgggaggctgaagtgagaagatggcttgagcccgggaggttgaggctgcagtgacccgtgatcacaccactgcactccactctgggtgacagagtgagactctgtctcaaaaataacacaaaagaaaataggctgggtatggtggtgcacacctgtaattcccagcactttgagaagccaaggtaggcggattgcttgaatccaggagtttacgaccagactgggcaacatggtgaaaccccgtctctacaaaaacaaaaaacaaacaaacagaaaaaaaaaaaaaaaccactacaaaaattagttgggcatggtggcacacgcctctattcccagctacttgggaggctgaggttggagaatcgcttgagcccaggaggttgaggctacagtgagctgagattgtgacacagcactccagcctggacaacagagtgagatcctgtctcaataaaaataaaaattaaaataaaagaaggacacctattattttcaaagtagagctttagaggaggagacagaagagggatgtgatagaaaaagattataacaagtttatatattttgaaaagattgctctgaataaatatataatgagctgcccttatgaagttaatttttaccaccacaaagcatgttcttttttttttcttttttgagacagaattttgctcttgtcacccacagtagagtgcaatggcacaatctcagctcactgcaacctcctcctcccaggttcaagtgattctcctgcctcagcctcccaagtagctgggattacaggcacctgccaccactcccagctaatttttgtatttttagtagagacggggtttcactatgttggccaggctggtctcaaactcctgacgtcaggtgatccaccctccttggcctcccaaactgctgggattacaggcgtgaaccactgtgcccagcccatgttctaaataagaaaggcacaatgaaaaatttgtagttattttgagattgcttccaaaaggcatccagggcagggagggcattggctcattgggttagccagatgaagaacctcgcaaggactgctgaacagtgaatttagctcttgtacgtgcatagtcatgtacttggtacaaatttcacagcacatgacagctgtgtggcacatctgttggagatccaaaaaatcagtttcacaagcattggttgggaaagattcagcttggcactagttctgagaaaagccctgggactttgaattgtgtgcaaatgtaatatgctgtaagttcactgaaatgttagtctttgcccatgggataaaaatatctagtcctgttacaagccaagctgtttaaatcacacttgcagtactggtcatatgaagaaggatactggaaattagaatttgttcctaggatggtagtcaagaagaatctagaaattatgacataggaagtggttgaaagacttggagatgacagatctgtagtccaacttgaacaggaaaagactaaggagggagatgccatagctatcttcagattcacaaaagcctgatgacgcagggccctttggatgtaaaacaacacccaaagattatgtctgttggataaataaaagaataaaaagagagtaggggtgtgtgtgtgtgtgtgtctgtgtgtgcctgagtgctgtatgtatctgtgtgtgttgtgtgtgtatgttttcaggcaagagcaaaaacacatgatgaaaattacagaaagagaggtagatttaaaacaccatataaaaatgttactgtttgtaacaaccaagctgaatgaccctctattagggatttataaaaagaatgtctacatgcaatggtaaactcaatcttgagaaggaacataaaatggaaagatgagggctttggagtcagacacatctgggagcaaattacatctttgccatttagctgtgtgactttaggcaagatacctagcctctctgagtatttgtttttccatctattaaatggggataataaaacccatgttaaaatgttgtgagaattaactgagctgtcgaatgtaaagtcctagaaacagtatgctttggataagtgttagctgacttttctagattagatgtcatccaaagtagaaagagtgagttatagaaattactgtaaggcagtcacttagcaggtccattagatgtacgtggtcaccgctgggcacggtggctcacgcctgtaatcccagcactttgggaggccgaggcaggcggatcacctgaggtcaggagtttgagaccagcctagccaacactggcgaaaccccatctctaccaaaaatataaaaattagctgggcatggtggtgcgcacctataatcccagctacttgggaggctgaggcaggagaatcacttgaacccaggaggcagaggtttcagtgagctgagatcatgccactgcactccacactccagcctgggcgacagagcaagacttggtctcaaaaaaaaaaaaaaaaagatgtacattgtccccttgtattgtcagtgcctgacacagagcctgcacagggagccactcagcaggtgatggcacatctgttgactttattgtcagcactatggttaagtcacgccctagaaacatattctcaatatggcagcatggccaacagagacagcctgtgtagggaagggaggttggtgttcgcatcaggcagaggttcaaatctcagttctccactgggtggagttacttcacctttccgagctgcatgtttctcttctgaggcagtacgtgtttcatggagtgagtgatgaaatcgcatatgcaaaggcatttgatattcttttcccagagggatcctctttacaatccagggaggcagataatgcagtctgtatggaagaaaaaacaagattcagaaaattgaagtgatgtgcccaaggaaatagcagaattggtatttgattctttccttttaacctgaaggcccatcatctctctctccgagaccatgacggaaacattttttggtgtctcagtgtgccgggtactatgctgggtgtttccgtgtttcgcttctttgctgttcgggtccttatggagatgttagtcactttgcgagtctctttggaacatctgcaggatgggcttcctagatacttgagaaaggtcattcttcatgggacacttggctttgggaggagacatgtgcccagacggtcacgtccactcctttgccttgacgggcaccggtgggatgggtgttgtgtatcttgagcagcgacaccatcggctaatagctgtgctgagtccgcagctgcccatcctcaggtctccgtgagcccacacacttgctctgtgggattgcagtgttttgaaatgaactccttgcaaacatttaaatcagaaatatccgcataaaaatgtaatttaacattttgggtttctctcgaggaactggacagtctggcaaccctgagcccatgttctcccagacagcagcccaccagcattgcatagtgcctacttcctttaagtggagcaggcgtccccggggtccctgcactgccaattgcactcccatatcttcctcccgcaaggagtgtaggttaccatatagtactcatgcataatttctatcaataataacataaacacctgctagaacagttcctgaggtgtttttttttttttttgacgatctcttttgtatgcttcctccccagtctgtgattgcaatgggaagtccaggcagtgtatctttgatcgggaacttcacagacaaactggtaatggattccgctgcctcaactgcaatgacaacactgatggcattcactgcgagaagtgcaagaatggcttttaccggcacagagaaagggaccgctgtttgccctgcaattgtaactccaaaggtagctgaaaaggacggaaagagggagagggagatggagcagtggggagacaagagggaaggaaggaaggaggaaaagaagaaggaagggaacaacggaggaaaaagaaagaaaacagggaaagcaagcaggccaagagggagatgttcaacctcaccaacaactgggaacctaccagacattggtctttttagcagtttcaatctgaaaggaaacatgtttctcttaagtaggggttggtggaaccagttgggaccttgagggcatgttgtcttgaattctaatacaaagagtcacattattaacttttccaggcaggtgacagtcttttgcaagcagatgacaaaggaagcttgcactctttcagggatagttcttcatatccatagccatccatttgaccaacctcttgaaaaataaggaattagaaagatctgtttctagtgctgtgctaggtgctagcaatatgaagttgtactaataaaggagacagacaagtaaacaggaaaattgaagtctttcattaggttgctaaaaagataaaacaaaataacaaataggaaacacctaatggggtggctggttcataggagagctagtttgtttttttgttttgttttgtttttttgagacagggtctcacactgttgtccagactggagtgcagtggtgccatctcggctcactgcaacctccgcctcctaggttcaagcgattcccctgccttagcttcctgagtagctgggattacaggcacccaccaccacgcccagctaattttttgtatttttagtagagatggggtttcattatgttggccaggctggtctcgagtgcctgacctcgtgatccacttgcctcagcctcccaaagtgctaagactacaggtgtgagccaccgcgcctggctagttgtttttttttttttttttaaagtatcccacacagtgctatattcatataactgtaggtctttgctgtacacacagatacatacactgtgctgtattcattgtggacagacagtaaagacaagttagtaaatataaagggggagagagaggtggttctgtaaataagattttttttttaaacggttcatttgtctattatctttctggcattatctacttttctttgctagaaagtgtttaacagcatcctgtgataaatattgatccacttaaagcatacagccttattgcatggcaatgacttagtgtagtaggtctgtggaaccaactgatagctgcagcttgaaagaatctaaaaatgggcagattctggtgcagccatgagttgctggtagagtggtttgggagtcttatagaaaactgggtgaccctgtggtgagataggcccatatcgcagcagtcaccccccaaattcacctaagttgctgtcacaatgtggtttgactcagattagtttagctttgttgtgtggaatttgcatccagaatcttttggatttagcagtcctccctatgaatcaaagaacttcataaaaaaattaaaagacaaattattgcattttaatgggcatttaacctctctgaagagctcctattgccttaggtcatgcagcttcattgtgagtcaccagagttgggtcatcccagtgaaatgatcagtgagaatgaaactagaaatttaattggctcagcttgaaagcctggcctgaagacaaggttattagtctcagggtagaccaggaacctgctgcctagcacagaaggatggtaaagaaggatttaccatgtcatctcttctgtttcagcatgtagtctactgcttgcccagtggtaagggcaagtgaaactggctccttctttttatttgggtaatagatatcccagactcagtgggaacagcttggcaggaagtggtggagcccagtattgatttatgtcttatatgatagttaacatgtgccatgtgccaaccctgggccaggcacttttctaggtgcttttaatccagtaattaattaatcttcacaaataactaaagagggggctatgttttttcccatttcacaaatgatgtagcagagacttagggagggaggggaagaaacttgtccaaggtcatagagctaaggggcagagtaagagttcaggaccaggtttgttgacatcaaaggtaataatgtagagtacagtggtgggttatggagccaggcagccagggtgcaaatctggacacaaccaccatcatcattaggtcactctgggcaggttccttaacctcttgctgctccagcatccccatctgttaaagagtgttcatgatattcatgtcatgggatcctgtggagataaaatggtgtttgacaagcacatggcgggcaactcagtaaattgtgaattgatgtagttgtttttcttattaagacagtggggaaactgagacctagaaaaattaatgaatggcctaaagtcttccagcaactgattgcaagaactaaagttgtaagccagatcttctgatcaagaataattctcttattccctccatatgaaagaaaaaaaaatcagaatggcatttttcaatgcccaaaagcagacaatttatgtgtacacaaaaagcttgatggatattatttcctaagatctgactaatgctttataattttccaaaacattatcatagatgatgtccttcttagtcctcataacagtctgacaacaatgtgttaacacatccactgttaaagagatgaagaaactgaactttcagggtccaaactgcagaggctgaaagacacattggtgacagagactgttcccaccatgtgctgtccccagctgctcctcagctgcacatgtcaccaaaccactagcacaagtttaattccctatgtgatttctcagtatcccaattagccagaggatatttttcactttcagataataacttgacagggaaatctgttgtatattccatttcaaatgcaaaataacatgtcttacaaaaaaatgctatcattacatgtatgtcaaatgaagccaatggcattaataaaccccagagtagtcaccaattttggactttatatcgatttcccaaaaatgcagaaattaggcttatttttagattatgactttgtgggctcagcaacagggctgagttaccttcagctcttccaaccacatatttaagccctgataaccttttgcagatactttgaaattcactgcgtgtgcaagttttttcctcccatgacagctaagtttttgaggtctatgtgatattggacttactctcttaattttatatttttttacatatctttgatgcttacagtgtattattcagactataacatttgagtaattatttaaaacatgtttttaaatgcaagtgtatatatttttaaaagggttctcaaaaggatgcaaattctctgtttatatgttttgtttatttgtttttattgggtttgttgttgttgttttgagacaagatctcactctgtggccaaggctggagtgcagcggctccatcatggcttactgcagcctcaaactcctgggctcaagcagtcctcctgcctcagcctcctgagtagctcggactactggtgtgttccaccatgcctgactaattttttatttttttgtggagacagggtctatgttgcccaggctggtctcaaattcctgggctcaagaaatcctcctgcctcagtctcccctaactgctggtattacaagcatgagccaccatgctcggccctaaattttaaatatttatcattttttaataccttcctgagtcttcaaatgcatgtaggctatatctatataaagcatgaatgtgcttactgggacacaaatttgaaacaggaagttattccttatctattctttaaaaccaattgttcacaatccctaagtacagttcatgatgtgggaattggggcaggttgttttttttttgagtgagactttgaagaaccagtgctattattttggaagttttggaacatgaaataagtcagtcatattcagagttagagcctgaattacttcttcccccactttattaaaataattcatttctgaaaaactactgcagggagagttttctgaagttgaaagtgtaataaatttggatgcagaaaaaatgtgtttctgatccccaaatcagcatccattcatgttaaaaacaaccaaatttcatcatgagggacttctatttaacattacttatcagagcattattcaaaaaggaattttccttccttctgctgaccactcacagagcaatgatcatgaagtctctaaacatcaaaccaaatagcctctcttcattctcatcttatttaaaagctctcttgccttaggctctgaaaaccttccttctctcctcctcccctcaccctccttagacctctcctccctgccttccattgctcattgtttgattagaccctgccctgagacttctccctctccaatcatcctctcttaatagatgggctctatctctgtcctcaccacttcccctcctctctccatctacttctggactgatctcacatttactatggcttcctattcagcctgagtgttgagggctcctagatcttcatctctagactctgagctccagatgaacatttccaccttttatatgcccctagaaactcaagttcatatacccaaaactaaactcattatcttctcttgataattcaacctgaggtcttggtcctcctcctgttttccctggtttggtaaatagcatcacagtccagccaggtgtgcactctggggacctgagtgtcatcaatgtgatcctctctccctcatcattcctaacccaagagtcacctaaatctgtttgttctatatccacagtggctctcacaatgcttccctccttctcttctcactcagacccctctaatccaggccatcatggcatgggaggagacatgctgatcttgccttctccaagccatcctgcagactgctctagagttctctttctaagtgcaggtctgaacttgtcactgcctgcctaaacctctgagagttcctattatgcagaaattgatctgttattctgctgtgaacttttaattcactactaaatagcgtgagctaatacatataaagtgcctaactcaacatctaaggagatgctcaaaaaatgtcatttatgctattatcactgaaggctccttcaagccttgcaaagttgatatgtagatgttcatagactcaaactgtaaatgtgactcatttatttcacattccacatgctgcataaagtcttcatacaggcacagaaccgatatctttatcgatttgaattctactagtaaattaaaagttcacagaaagataataaatttaaaaaacaaacatgtagcgactggtcaatgttcccttggcttcatagactatggatactaatcattacagatacttaagatataggctgggtgccctgggtcatgcctataatcccagcactttgggaggctgaggctggtggatcatgaggtcaggagttcgagaccagcctggccaacatggtgaaatcccgtctctactaaaatacaaaaaattagccaggtgtggtggcacatgcctgtagtcccagctactcaggagactgaggtaggggaatcgcttgaaccagggaggcagaggttgcagtgagccaaaaaaaaaaaaaaaaaaaaagatatacagatcatggccaggtgcggtggctcatgcctgtaatcccagcactttgggaggccaaggcaggcagatcacctaagattgggagttcgagaccagcctggccaacatggagaaaccccgtctctactaaaaatacaaaactagctgggcgtggtggcgcatgcctgtaatcccagctacttgggaggctgaggcaggagaatcgcttgaacccggaaggtggaggttgctgacctaggcaacaggagcaaaacttcgtctcaaaaaaaaaaaaaaatacagattattttacaattccactgaattgcaggggaattataaggtagctgaggtgtacctagctagccttccacctcatcttttggctttctctcagctccttccacaacagctcagccctcctccttggcatatacacattagttgaacagatttctgggcacctgccttgtgtcaggcaccatgctgggcagtgggaatacggcaggtgacataaggtgagatcatcctaagtcaagtagggctgaggactggggaaggggtgggatgggattttagatgcaggagtcagagaagatttctctagaaaagtaatatttaatcaagacctgagtgctgagaatgtgccaactaggggaagtctgaggaaagagcattccagactgagggagcagcaagtgcaaataccttgagggaagctgcttagcactttgcctgaaccaagagagctgggtcgctggaacctagtgaaggagggtaggagatgaggtaagagaggtagggtcttgcagatcatgatatgaagttggcatcttattctgcttagagtgggggccactggaggacctaactatcgaattacatttttaaagaatatcctggcttctctgtggagtgtggagaggcaaggatggaggcagggaggagagtgcaaggcagggcctgggtgagagaaggtggagctggaatgggagtgagtgtggaaaggcaggtggtgagacctggcagcatcccacagtgacacattttgttgccctgagtttttcatgaacactcaatctgagaggacccatttacaactaggagcatatctgtaaaaagtggaatcataagacaagtacagtcccctaagtaaggcacacagggtacatctcacttgggggcgtaccacaggggacactctctagcactcctggcaggtggatagttttggttaatagccctttttatgctcttaaaaatcataccacataagcactgacccttaaaagatgactttgcctgccagggataagggagaatgctgctcactttcagatacaaactctcttctaggaggccaatgtgctcattcacaaattttccttgagatcttaaagatttgatggacttcttttaaaaagcagtgagcaatatgctacctactgtcacaatcagagcagacaaagacaaatgcttttatgagtaatttaattcctctccctgaggaagacatcctcagctgtcagcaccatccccggtgacacgcaggcgatgtgaagtgactgttaaaagcagcagatggtgcttcttacttcgtgtttacggagcacccatagggtgatagttgcttccaatgccgcatacattaaaatatttcttcttcttctttcctttcccctaccttgtgggtttcaggttctcttagtgctcgatgtgacaactccggacggtgcagctgtaaaccaggtgtgacaggagccagatgcgaccgatgtctgccaggcttccacatgctcacggatgcggggtgcacccaagaccagagactgctgtgagtatttgcatcccaccatggctgtcactaactcagtgatgacaattatataaaccttagcaaacacttgtatttactgagcccctaccctgtgccaaacactgctttgagagtacatcatttgggctatctactttaatcctcacaatacccctaagaggttgggattatcattatatgcatttcaaagataaaaaacttaaaccatatgaggttaagttgcctgatgttaccggtgaggctggacctaatacttaagctcagagttttgggtccagagcctatgtccttttctctggcaattgcttccctctagatgaactggaagggaggcaacaagtccttcaagtaacctgggacccattttggccccagtgaatttgggtggaactgttctgcataatcttgatcccctttagtttggaatatcctgtatccctgctcggatattttttggaagatgagcatgcattaaatgtcacataaccaatctgcagagatgcagagctggcaagtgttgggatggcttggcaggggcttggcagtgaagcattgggcattggctagcaaggctcccacagaggaggcgcgtcccattgcccactttgctggctccttgctgggacaggagctgccctccagccatactgcattgtcccagttgtcaaggtcccaagttgtcatactctcttggcatttgttctggtccggccttccctgaccctttcagatggtcttcagagatcacccctgccccactcctcctttgtaacccttttaaaacataaccctctgttagctccgcctccccgccccaattcagaatgagataaaacttatcaaggtcctgcaaggtcctcctccctctccaccctcagcctaggtgcctgcttggtttctcgtcactttcctccctgctccctgcactccgcagggaagccacaatagctttccttcccttcttcaaagagccaagtgcatgtggccttggcacatcctggagagctctgccttccccgaagccgtgcagcgcctcctgctccatccccaccccactatctcctcacagaggccttcctgcagcagtcccacccctctgtgttctcactctgctgtttcactccatatcttattttctattcatgtttgtccatttctcccactaaaatgtaagccccctgtgactctgtcttgtttgcttctgtgtccccatgcctggagtgggaagaggcaccttgaggatgtccagtgcatctgcagctggccctgtgcctgctgcccttgcgatccacacacctgacctggcataggactcctatggaatggggactgttcctatttctcttagcatccccggttctgagcacccggtagatgctgaatacgtgtttgtcagatggtccagataagcagtagagagggagctaagaaggaaggaggccgtgagaattcaaagataaagattggcaaagaaattccagccataagcattgctagacttggcatgtgactggatgaggaatgtgagggagaaggaggggtcaagggtgctccaggtttgtgcaggatttgggtgggatcatagggcaggcagaggaggaacggatcagtagagaagagacaataaacttggtttttgagcaatgagataaaacacatgattgcgtgcaaagtgggtgacagaagcagggatggatgagatagggagattgtgccagaattcagtgaaagctctgataccttcattgagaaaatcttgccacaaacaaacaaacaaacaaacaaacaaacaaaagtctattaaacccagcaatcccagcaattccactcctaggtatacacccaagagaaatgagaaggtagatatctgcacaaaaacttgtacacacacattcacagcaacattactcataatagctgaaaagtgaaaacagtaaccaaaaagaatatatgtattctgtcaccaaaaagaatttatgtactgacacatactatgacatagatgaacctcaaaagcatcatgctaagtgaaagaagccagtcacgaaagaccacatatggtataattccattgataggaaatgtctagaataggcaagtctggagagacagaaagtagactggtggctgccgagggctggaggtgggactggagggaagagatgtggcagggtgggggacacaactgctaaagggcacaggatttctttccggaatgatcaaaatgttctaaaattaatattgacggtgatggctgtacaactctgagaatcagctaagaaccattggattgtacattttaaatgggtgaattgcatggcatatgaattatatctcaattgaggaattaccaacagaaagaactgaatggaataaaatagcaggtagatggaattaatcatgataaaaagcagacatcatttaattaaacaatagggaaacaaatgataatttttttaaaaaatgtaaactgagccaaacagtgaaccaaagtaaactaaacagttgagtgatgaacttggtttacattctggcacaaacccctgctctctttaggagtggcagacagttctcggcccagctgctacccaccaagtacactctgagcagcactgtgtaggcaagtgagtccttaagtgtgtgagagaggtccgcacgggcgaggatggctaggagaagcctcatcgaagaaggactgcccagcttcgtgatgtttgctcatgagcagttgatttttatgtgcatagttgtgaagcatttggaagcatgtccctaattttctttttcttcttccccagagactccaagtgtgactgtgacccagctggcatcgcagggccctgtgacgcgggccgctgtgtctgcaagccagctgtcactggagaacgctgtgataggtctgtgtgaaccgtggccctacaaacagcagagagagtcccttgccaactagcatgagaattaatcctccgagtgtaattatggaaaagggatacttgacaaacgttgatgaccttcttcctgctctctgtcctcaaaaactaagcttttacaacaacaacagcaaaaacacacacacacactgagcacccaaatctcactggactccatactctgctctgggcaccctctctttattttgactttgggagaggcacaggaccccagagattcctcccaccagctggctccaaatcccaggtgctctgtatgaggcagtaatcaatagtgagatcctgggacacaggctggttgcaggaaaggcctggcctaattaaacatgctgcgaaaattcttgtaagagggcctatcacagcatatggccatatataaccatcgtgtacagaagaggcactgccctggggataggatggcagttacatgcacacacatgaatgggcatggggctgggaggaggtaagagccctttgggccaagccacactggaggaggtggagcagtgaggcaccatccccccaagctgccggtgcaggacgtgccttaagtacaactgtgctctggctttaaactcttccctcccagaggctgttgagcagagggctgtgaggctggcgtcagaagcaaaggcttcctcctcatttccttaaaagtaagaaagcagttctttggcaccctgccagtcacttatacctgcacagaggaaatgtcaaatacactcctagcttgtgttttcaggggtttctggctgctgaggtgaaggcagggacataaagtttaagtgttaaaaaggaagtcacttgttgaaagcctttttaatttcaaaataaaagacagaaatagaatgccacataaaagaaatgttatcaccaccaatggtaagaaatagacctctgctaaaactgcgtcccagtgacaatgcccccctcctccctagaagtgaccactattctgacttttatggtaatcgctttctttctttgcttcataatttatgaccccagtgtgttcctaaacacaatcatttagttttgcctaattcccttcctttcccttcttttgtcttccctccccactcctcccctcccatccttccttgtttttttaagctcttttaatcagcaggtttcttctccatagaaaccataataattcttttaactcttgctcttagagaaaaaacaaagcttgtttagttacaactgttctctgaagcacctgctcttcacagctaccctgcttttctgtgatactgtactcagaacattccccccaacatgtggtgcagtggcttagactacatgatttggagacagatgtacatgaatttcaatcttgcctcagccatgtacctgctatatgtcaagagtttcttaacctcttggccttagtctcctcatctaagaaaattggaaatagcaattcctcatagggttggagggaggttaaatgagagaacacacacaaggtgcctggcacaacataagtgctaaataaataatcattgaaactatcgttatttcacattatttcatgtggaaggatgtagttaacttgagcagaggacaaacaagtcctccccagcttcccctgccttcttctctgtgactccagcatcgaggatgcccctgttagtcgtggttcttatagaagccactggagggattgagctgggagcagaggtggaatgcaagcttacacctggcttttggagagtgtcttagccatcctttttctttgtcatatcctcacctgcccttttccccagtgagccagagcccaggtacaagagtcagagatggggatcaatacctaagtggtcttggggagggggtcaatagagctgagtggtgctgaggcaggagcctcacctttcctggtccccacctcccagtctttgtcaccattaaacagtagctccaggacagggcagcattgcatagccctgcccacacccattctgctcatctgaccaccactcaatttcctaccaaggactggccgactactcagatgccagaccaccaagacaaatgtggctctgttctacaaaggaacagaaagtgaatgtttcttatgccgtctaatttaggggggtcgtgattgtccatctggtggtctgggggtgggggtgatatgcaaaatctggtatttccctcctctgaaaattaatagggccaaatggaagagaaggtagagaggctgactcattcatcatattttttctatagaataaaaaataacctataatatcctgatttctacaatgccactgcaggtgtcgatcaggttactataatctggatggggggaaccctgagggctgtacccagtgtttctgctatgggcattcagccagctgccgcagctctgcagaatacagtgtccataagatcacctctacctttcatcaaggtaaagccttctattttctaggttttagttttttaatgttgtacagggctttgtgtttagagacaaccacctccgcattcacaggatggattctctttagaaattctcttatagtattgaatgtacattattttgtcagggcactcaggcatatcctgatgtcttgaaaaagtcataggctgaaaatagttcattcatactagtgaatataacttaaaagaataactaaaaaagagactagatttttatttccctgaattttccatccccatctatttcaaaaccacgaaggaatcattcatttggtttggagagtgtatgagtcttcctggaattcacgttcactaataatgctgttttcacatataataaatgagctgatttatgtgaaattagttcccaagctacagaacactataaaaatattggaaactgatattatttcaacattaagtctgagtttccctttgaaaagactggacccgggccaagcgtggtggctcacacctgtaatcccagcactttgggaggccgagacaggtggatcacgaggtcaggagatcgagaccatcctggctaacatggtgaaaccccgtccctactaaaaatacaaaaaaattagccgggcgtagtggtgggcacctgtagtcccagctactcgggaggctgaggcaggagaatggcgtgaacccgggaggcggagcttgcagtgagccgagatcgcgccactgcactccagcctgggtgacagagcgagactccgtcttaaaaaaaaaacaaatgaaaaaaaaatgaaaagactggaccctctcacttcattaaggtgagagctttttatataaatacaaaaaaatgcaaattacaggcagaagaaaacctgctatcttatcacgagtcagactcaaagatgagaaatcatagcagctgcgggatgggagcaggtgaagttgagagccacatagagagatacatgcagaattttaaggaccatttgcaaatgtggaaatattgagaaaaccccactttctactcaccactaggacttgtcggcaagcaaatctttctttgtttaacttaatagatgatgagggcttgtccaatgcagactgattatgtttgtgttccagatgttgatggctggaaggctgtccaacgaaatgggtctcctgcaaagctccaatggtcacagcgccatcaagatgtgtttagctcagcccaacgactagaccctgtctattttgtggctcctggtatgtgaggaataatgtctcctatagaggccagcttataggactaggaagtcaagatagagaaattgagttagaaattgtggaaaccatataactttgggttcagggtagcagcatctccgggtagtgcaaccccagaagagagatgggggctaagcctgatttgagagtcactaaggaatggcccaacagagcagaatgtggtgtcccagaggtcagaccctggttgagctacctcctttaatcaaatgggaagtttctacgtttaccaccaaggcaagaaaccaaggactgtggccaaacctatgggtctattgagaagtaggtggaaagcaaaaacaaagcatttcttaaaacttcaaatacctgtaagttaaaaaaaaaaaaatcaatcagtggtacgtgccttggtggaaaagcgctggctagaattccgatcccagttcgtttccttagctcatatgtgattcttgggcaagttgttctcttaacttctctgaacttcagttttctctactgttaaatgggaatactaatgtctgcctcccagaattattgccagcaaatgtgatgatatttgtgaaggcattctgtcaactaaagcattatgtaacaagttgtgctatgctgataggcctgggatttttacaaaacagtctgtcataagggccacatcatgaatcacctaatagatggaattgtcttataacaaggccctcttatcatttcagtaactaaccctccttcatagcccaaagtgtcatagccatgtccagtaccaggtcctgactctcctagcaaggagttttggggcagcatgacacaggacttcaacagaaattgccgacaccagtgcaaacttgcatgtgtttgcctctccagtttcacaactgatctcaatcttttaaaactctgtttcacagccaaatttcttgggaatcaacaggtgagctatggtcaaagcctgtcctttgactaccgtgtggacagaggaggcagacacccatctgcccatgatgtgattctggaaggtgctggtctacggatcacagctcccttgatgccacttggcaagacactgccttgtgggctcaccaagacttacacattcaggtaaaaagagagaccataagtaggtcaattagagcaaactatgattgaagttcaagtttgttctttattcattcaatcatcattcatttgttcaacaagcctttctgagcaccttttacgtaccatgaaggttgctatgtgctgagaaaggacatgattccttccctcaagcagctgacaggctaatgggagagaaaaatgaatagataattacagtgcagtttgtcaagggacagaaataggcaaggtggacacagaagttctgagcacataaaggaggcatgactgacccacactggaatgatgaaggaaagcttcccaggaccacatgacaaatgtgaaaggcagccctctaaggaaagagaagggaggaaaggttaacaaggcagaggaaatgcaatgcttgaagaaggtttgtgcatttagaaaattccaggtggttgagcacgagtgaagcatgaagtcggcgataggagtgcagtgagaagtgaggtaggagaaagaggtgggagtgactttatggatggctttgtgtgtgtctacagggattgcacagtatcctgcagaatagggattctgcatggtgtttgcagagaggttggggaagggagctgtgcctactaagtgctcagtagtgcactggaggctgggaaataaagatggaacatggtctttgccttccaagagctcatggtctagtacaatgtataacatgtcaaaaagcaagcataatacagtaggataattgctttaggggtggtgcatgttcatggggtcttggaaagtgcccgattctgcctggaggagtcagggaaaccttcaggaggaggcaatgtgtggtctaagaatggaaaggtccacagggcttttccagggagaaaagtcagagaagggcaaccttcacatgtgaatatatgtggggatgcagaaaggcataatataggggagaactggcaagcaatatttatagctggaatacagcatgcataaggaagatgggtagatacatttgcaaaggttggaaaaggacccatcatgttgggccttgtgtgtcatgtcaaggagcttagatcttgtccatgctggaaagacgatgcagagccattgagagattgttaagtcaagaagtgtgatcgtcaggtgtgaaggctaggtgcaactacaggcaccatatagatgatagtttgggtcgggtccttaactggaccatcagaacacattcagagtggctcaactgagagtggttaggtgcctaacccaaggcaggggtaatggcaatagggaaaagaagacccacagaacacaaacaaagaattgatcaaatatccgagtatacgtgttctaatgatacacacacacacacacacacacacacacacacacagctctcctgcctggaatactcgttcccaccttccaggctttgtgaacttactctttgagattcagcttacatgttcttcctttgtattagccttctcagaatcccagctaaagttacagtcactttgtttttccatggtactctgtgcatgcatctgttatagcattcatggcattgtattataactgtgtctacccacctgactcccctggctggatgtgatcatctctccctgttgtctttgtgtcctccagcctgacatagcttctagcccaaaccaagtgcacagtcaacttttatttaacaaatcagtgaatgaaacgaaggtgggtagggttgttcctggatgagtaaaaaacaaaacaaaatttagaagaacagcacaggggctggtgatatgttacagtgagccaaaatgatgccaaattaaaaagtattaagtgtggacaatgtaaaagtggaaactgatttttgaaaaaagtaagtaaaatgtgctcagataacaaataaatgattttttttaaaaaaaatgaatagtagctcttgagaatcagaacttctggaacgtggagatgttcctaatactagcttatgggtggccaagaatagaaagtggtgtctgagaacttgcgatcatcatggtttcaggtgatgtcacccctggatctggacttcccacactgggatgccctccatcacttcctctggggtttgtcctccccatggagtgaggaaggtccaagtacatgcctatgaaaaggtggctctcagtcctatgcccccttctaagcaggactgggaaggggcttagctgttcccgtatcctcaggcataatttataacaggtaggtatgtggtaagaatcggatttttaaagcttttgattttaaattatgcaggttaaatgagcatccaagcaataattggagcccccagctgagttactttgagtatcgaaggttactgcggaatctcacagccctccgcatccgagctacatatggagaatacagtaagtggctacgagaaattaatttctttcttcttaggtgttagtttaatttgattcagctctctaaggtggcggcagtctccaaacaagtagataagttacttgatgatcctgacttagaatcactgattcaatctgaatttttatattctagaagcttttttagaagaaatgtttctctaaaaagatgtcagcacccagcaccaatgaagagtaaatgatgctgtcttgctaaaagggccactgaatttttattaaagatgattaagtgagaaagataatctacaataaatggacacatttccttagctaggaaatggcacctacaacacagtcttatttattccttgagcagcttttccttttgagattatactccatgctagcctgtctgagtcatcatgtattctattaattccttttttttttttttttgaatttcacatgttgggtcctcctaatctcaactggaattatttaacaagagttccttaagcttttctgcactcactcacctaaaaaggaagcgtggctagcatgcaccatttccatgtcactgatgcagtaaataaagtcggaagcagaaaggtgtaacaatgtattgactcttactgtatgccagatagattataatatatgaattatctaatttaattttcacaacggacataagagataaataccaccgttacttcttgtctatagttgatgaaacacagtcatggagaggctaagtgacttgcccaatttacacagctagtgagggtggattcagaatttaagccctgggttttctgaccccagagcctgtgtgctcagtcacagtgggagactgccatacctctctacatggcatgatatatgaacaccacctgtctttgttagggagttaagaaaaataaaatcccaagagagatctgacttgagatctttagactgtaccacttgcaacttctaacctgttctctcgattgcaggtactgggtacattgacaatgtgaccctgatttcagcccgccctgtctctggagccccagcaccctgggttgaacagtgtatatgtcctgttgggtacaaggggcaattctgccaggattgtgcttctggctacaagagagattcagcgagactggggccttttggcacctgtattccttgtaactgtcaagggggaggggcctgtgatccagacacaggtgagtgaaatgacacctggaccaggtggctggggtgtcatgtggaagagagagagctgtgtaagaaagaccatggctgaactcacatcagaggtgggaaaggattaaggagagcagagctggagtcagggaagatggacatggtgccttattacactcaatcctcttcactgtggaaatgccacaaagttgtgagaaaggtgccaggttacaggaaatggtcgtcatggttcagtgctgggtagaagagttggtgtcgagttccaagaattgtgtggggagatcaaagacaagtccgggtctaaatgaatgtgccgacaaatggtgtcaggccacagagaacatggggaacagtgttaagttatggatagtaaaagaagtgagtgtctactttgcataggggagtgagggtgagattcagggtcttggccatgtttagatttggttctatgggaggggtgaatgccagtgctcaggcactttggggaaggcttcagaaaggaaggctttgacattctacactctgacccatgttgaaggaaatgtattgtctgaccctgctcacttctctgcccctccactcttctcctacccccaggagattgttattcaggggatgagaatcctgacattgagtgtgctgactgcccaattggtttctacaacgatccgcacgacccccgcagctgcaagccatgtccctgtcataacgggttcagctgctcagtgatgccggagacggaggaggtggtgtgcaataactgccctcccggggtcaccggtaaggccatgggtctgctctgccacctgcctcttcctgtcctgatgccatgaatgtgtgcaaatagcttccattccgaggaattcctaggaaattataatgacttcgggttcacccaaatgtgctcactctaaagataatatcttaaagataagatattgcaatgcccaagaggtgaagtggattaagcaagagcagagtgcaattatgggagaaaacacctaaagctgttttgagaggtttgtcattagaagatgacattttcagaccaagcacatggtttgtttcttaatgaactaagataacgagggaaaacttagtgacttcttaaatgtcacatccttctgctggtcaatctgaaagaagaatggattcttcagcagcagttttgggggtattgctcaaaaccttactacttctgtggagctgcctgctttttcccagccagctagttaagcctcctagtggcgctactgtgttctgcaacctgcagtgggcatggagagagagggccagccctgccttgcatgcctgctcctgagggctttgttctggggtccctagggaagcacatttctctggctcttctagagggtgactcgcaactttaggcctctgcgtctggtcttcctcctgatggatgtcgacctaggcttggtcatttgttccttcccaggtgcccgctgtgagctctgtgctgatggctactttggggacccctttggtgaacatggcccagtgaggccttgtcagccctgtcaatgcaacaacaatgtggaccccagtgcctctgggaattgtgaccggctgacaggcaggtgtttgaagtgtatccacaacacagccggcatctactgcgaccagtgcaaagcaggctacttcggggacccattggctcccaacccagcagacaagtgtcgaggtaggactccaccccaggcaggctgtgtctgtgcgtgcctgtgtacgtatgcacttgcttgccatctaagcagggacaatggcagttcatatcatgatgttactttgattctctgaccaaactggcctgtgagcaccctgggcctttcttcctctgtcaaaggccttaagacaggtttaccctgtagccaggctctggaagacagagctgggttaaagctgggtgggagaagtgaaaaaggtcaggtttacattcctacgcggaaaaggatgtaacacggggccacatcctatgcccaatcccaaggcagggaggcagggaagtggctgccaaacctgttgtaggagagtaataaatgacttgagagtaagcctaagcaaactcaagtgggaaggggagtgggctgtaaaatagtttaagagactctctcaggaagtcagcgtaattgatgtgtagaaaggtaacagtcaacagttctcctaacaagacagcttcaaagcagcagctatagtggagcattcctgaggcctgctgcagatcaaagcatgaatgtgcagactggtcctcttgcccagcgtttctttcaaatctttgcacatgttatattttagaggcaagttcagttctagaggagctggcctgccccacagactcacccctcagtcccaggctgaccttggtgcccagaactcaggagtttgtttaccctaactttgtttataaagtccagaatggggccgggaatggtggctcacacctgcagtcccagcactttgggaagctgaggtgggtggatcacctgaggttgtgagttcaagaccagcctggccaacatggtgaaaccccatctctactaaaaatacaaatattagctggacgtggtggtgggtgcctgtaatcccagctactcaggaggccgaggcacaagaatctcttgaacccaggaggcagaggttgcagtgagccgagatcatgtcactgcactccagccgggcaacagcgcaagactccatctcaaaaaaaaaaaaaaaaaaagtccagagccactctggacacccaggttggaagactcttggttcctcatgaagacccagaggtttgcatggagctcacagcctcccactcacaccagagtctccaccttgaagtgcttgaggacctctgcaacctgaggcttctacttagtggtacaaatcccttcaggaattctaggccagaccagcccagaccccaaactctgggttagctgtgatatgctagaaagcaccttatgagaggaaaagcccatatgacaccaacaggactgagttcaagtccagttttgtaacatacctattatattatgctaattatgccaattaatccctctaagcctcagtttccttatatgtgtgattaatatttaactcgaagtggtggatacaagaaagcacactataaacactataattctagttatatattctaactatattctgtctttagttttagctgtaattctaggttactaacagaaatttcactggctttacaccacacatttcttcactcaaccatcctttatcaagcacataccatgtacccagtgtggacctagatactgaggccataatggtgaataagtcatcccaactctcgaagagtccgtatgataataaggaagatacacaaatatgtatgcaaataatgataacacacttagatacgtaatcagcgttttgtgagcactgaagatagaacaactcagagaatcactgtaatcatcagagaagtgtctcacccactatcatatccttaactcctataacagaacctggcttaatcaatttggttgaatgagtaaaggtattgctttcttaactgtatttcctacaccaaaggccgcagaacagaggaaagaacattggctctgcctgacctctcattgtagcttgccatttacttgccatgtaacctcaggcaaattagtcaacttccctgagctcacattcctcatctgcaaaatagagggggatgtctacatctggcacgtaatgggcccagaagaaatgttattcaccttgaaagcaaagccagagtgcttgcagaatatctaataggcttttagtttaacagggggaggaaaatgagtgctgccagaaaggctgtaatctccctgcatccacacacaccaggcaaacctgccacatgattcctaagacctatctgtattaagaaggtgcatggaggtataaaaggattctctgctgttggaggcttgatctccttccttgtatctttgctctacctccactttctagactagtttgatgtgaatgctccatttgtcttttgtctctagcttgcaactgtaaccccatgggctcagagcctgtaggatgtcgaagtgatggcacctgtgtttgcaagccaggatttggtggccccaactgtgagcatggagcattcagctgtccagcttgctataatcaagtgaagattcaggtatgcattcttccccttaccacccccaaccccacagaatcaaatccttaagtgtccactgggtggttctgtcacagatctaggacactcctagtctcctgaggatgggagtagtgattactatttctgtctttaaaaattgctgcattaaaaaaattctgtataatgataatacttcaggtttatgtctttatatataccattttcaaaacctcttttgcagatactgtttcatttggtactcatgataacttagttgagttgaaaggaaaagtattctgacctcagttttcactggtcaaataaagtctcaaaatacttgaaatttttcaaagtgatatgggtaggtggaactgggaatcccacccatgtcccctaacttagttcagggctcttcccactataatatttcactttccagctcgatttcttttcaacagatgtctttgtaaaacaaatgaagaaaaacataaacataaaagatatcaggagtccagaaagtatcaaggcttcccaaaaaggaatggcctccagaaatttctcatttgaattacagagaagaatgaacttgatgttcttgttaattattaactatttttcttcctggaatgaggattggggaagacaaaggcccaaacagaactccaaatgtagagcaaactcaacttgtttttcaaactgatctatttaacaagccttttacgcacttcctttgtgtcaggcactgttctcttgtctctagcttgcaactgctttcactttacaaatattaactgcattttgagctttatagatgttaacccaggtagtccaagtaataactttaggagacactattcttattttcattatcctaattttatagataaagaaagtgacttgcccaaggtcatacagctagtgagtagtgaggccaggattcaaactcaaggactctctaggctccagggtctaaaattttaaccaccatgacatgctaagcatttctggacttttagtattatcccctgggtacctggtattggatgatcccttgggtacatggtctccaccctcgttctgatctttcctgtgtggtttcagatggatcagtttatgcagcagcttcagagaatggaggccctgatttcaaaggctcagggtggtgatggagtagtacctgatacagagctggaaggcaggatgcagcaggctgagcaggcccttcaggacattctgagagatgcccagatttcagaaggtgatgaaggccaacttcccttcagacagaagagaattcatagtcctagaaggaatggctacgttaggtcatagaatcttctatggatatcagttcagcagttatctccagccagcccttgcagaagtggaaggactgtctgtggcattccccctgggatctgaatgatggtgataaaagaatggttggatgcatttctctattgggtttttgtcatttgaccataagccagtcaaccctccgttatgtttgctaactctatgctgacccagaaagtgctcatgctccctttccttctttgcgttcaggtgctagcagatcccttggtctccagttggccaaggtgaggagccaagagaacagctaccagagccgcctggatgacctcaagatgactgtggaaagagttcgggctctgggaagtcagtaccagaaccgagttcgggatactcacaggctcatcactcagatgcagctgagcctggcagaaagtgaagcttccttgggaaacactgtaggtttttgctgggctagagtattgagaatactgctgtgttgggagacctacttgtagatctcactgactcaatttctgtctctcagtggctcactttctgtttctgatctacctgacaggttgttggacttcttttccttgcaacagtcacatctatttatgtctttggccttctgaagtttcctattttactgcattatgttcttctcctaagttcatttatttctaactacatcctcatcttggccctgcctcacctcccttctgcatatctcctagcttgttagctcccagagggcaggatttactttagttcatatttactttctcagcctacaacacagtgtatagctgtggtaaatttctagtgtatgaatgaatggataaatgaatgaatgaatgaaaaaggaaggaaggaaagaaggaagaaaggatggaggaagggacagagggaaagaagaacaaaggaagagagtagggaaggaaggaaggaaggaagacatggttttgaaaatgggaaaaaaatgctgccagtatgattttcttgatgtagtttgtaatgtggtaggagggagagatttgattgagcactcttctatttctgaataaagaaggttatggtaacaataatgtaaatggatgggtgggagatgaatagaggaagtggaatgataatcagatactataatgaggaagtcacattaaaaataatgtgtattgattgtttcctttattacagaaatgtttgttgtagaaaataaataaaaattctctatgatcccattactatcaaataaccactgttaaaatttggaatatattctactggactttaaattcatataaaaaatgtacatgtatatatttttatttttattttttttggcttccagcaggaaaagaatttttattttactttgttgttgttttggatttttttatgtatatatattttaatgcatctatatctatatacagacttttttgaacttggatttctttgctcttgtctatacatactttttttttcttttttttttttcgagatggagttttgtttttgttgcccaggctggagtacaatggtgcgatctcggctcactgcaacctccacctcccaggttcaggcgattctcctgcctcagcctcccaagtagctgggattacaggcatgcaccaccatgcctggctaattattgcatttttagaagggacggggtttcaccatgttggtcaggctggtcttgaactcctgacctcaggtgattcacccgccctggcctcccaaagtgctgggattacaggcatgagccaccacacccggcctatacatactttttaaaaatagaataatggtgaatagaggcatggtgtaagtgtcagggtgtggaaccctgtgtggctaatgacaagtggttctgacaggacagatgcacctgcttaagttccatggccaagtgcaaagccttaaccgattcgccttaaccgattctccttttcccacagaacattcctgcctcagaccactacgtggggccaaatggctttaaaagtctggctcaggaggccacaagattagcagaaaggtgagcagcattagagggcacctctgcttcaagccgtctctgcaaggccagacttgaataagagtgtagggtattagggacccaagcatcgtatttattctctccaggctcctttgcagccattccctaccttgaaaccagtttttaaccacttggcttttattgtatgtaagtggccactgggcagggtcatttggcaggagttgggggtgagggtgtttctttcccacatttccctatgactcacagtatggctgtgttgtatgtcagatgtgattcctcgggccacgtgaaatgaatcagcccttggaagagaaagctctgcagctttcagggactcccacaccaagcctgggaacaagtagcaacgagttgttttttagcctgtgggggccaagactgcagagggggaacttcctcctgaaaaccggctctgcagggccccaatgataacacgcagctcccttcatccttggctctgactagaaatcctacggtgtttaagaggtttgctggtagcggtctgctcagcagggtggcaggctctgttaatcccaagtggaattcagtcagcggaagagggctgatttgtatattttgtaacatgagctgcctcctgagctcgtttttaattttgtttctttgggttttttttaaagaagcactttttagaaccaggaggaaccaaaagtatccagggaatttttatagacatgctttgtccccctagtggtgggcccagtttagagctgaagcgaaagtgcgtaaaggttggatcctgggtgaaataagacctagaggtttcttcctgcagcaaacagcttacagatgcagtgttttatcacctgagactgctcccacccatctccacactccaccccgctccgggactccagtgattatgccataaacggaaaagatcactacaaggtctatgacataaggcgaattctccaaaacactttctgcttcttgacagcacctctaattccatgtaatttgagtcagttctgtagggtttttctaaatcagaccagctcccgtactctttgcccttcgtgtaactgaacaacctaaaggaagccctttgcgtgaaaactcttattcttttgtttttaatcctttcagccacgttgagtcagccagtaacatggagcaactgacaagggaaactgaggactattccaaacaagccctctcactggtgcgcaaggccctgcatgaaggagtcggaagcggaagcggtagcccggacggtgctgtggtgcaagggcttgtggaaaagtacgttcctacgggtcctcccgtggctcattataccttggatactcccagggcaaaatgctaaccgtacttgaggggcaccatgctagttgtaaaaaacatattattaatgataataagagggccgaaatcatgggagttttactttggggaaaagcagatatttttaagactggaagaaaaaaagattggttagtctaaataaaattaatgttttgattgagattacaatactgggaggtatggtcaccctctggtgtttgaagggtgtgaataaacccatctgatggcatggggagatataaaaatacagaaatatatttctgttatcaagaagtggggaatttgggattgaatttttctgacccaacctgtgtaaattaaaaggcttatgtttagtggagagggacaagtatctgataaataattttgtttggttcttctggttattctaactacatactttcaagacaacagggtgaaattttgcttttgttaaaaaaaaagggggggccaggtgtggtggctcactcttgtagtcccagctacttgggaggctgaattgggaggattgcttgagcgtgggaggatgaggctatagtgagctgtgatcacgccactgcactccagcctggacaacagagtgaaaccctgtctcaaaaaaaaaaaaaaaaaagaattctcaaagtcctctttttattaccgccccctccccacccccaacaccagattggagaaaaccaagtccctggcccagcagttgacaagggaggccactcaagcggaaattgaagcagataggtcttatcagcacagtctccgcctcctggattcagtgtctcggcttcagggagtcagtgatcagtcctttcaggtgagggcatctggcctgtgtgcttgatatacaggagggccataaatactttcttttctgggggtgccataatattgttcaaacattcagctttttctccatgttgaccatttctgttttagagtgggaagagtatttagccttctcattacccatttgcttgttcttaaaccacaatcctagtctctggaaaggatttgacccatgctaaacctattactggataaaagttttatgtatcttccttagttctggggattgttgaaacctgtggaaaatttttataaagtttttttgtttacgcttgagtccaacctatagtatatctctatgtatagccactctgagatgacttcttctcaaaagttttgcattgtttctgccatcagttcctttaacaattccaaacttattcgattaagaagattttgtttactacctatagaaaaaaaaattcacaatccccatggatatatgttcccatgaatatataaactaacatgtaaacatttaaaaaatgaaaaagaacagagacaaagcctgtttgacattgaggggacctgctgccttactttcattgggcatactgactcatttttgttaggttttgggcctggatggctagtgactattttcttggcttcttaaggctgttgctattttcaaacaatggtgccaggtcctaacaaggctggtgtggtaactggtaagcagaagtcagactccctggtttctttgggctcataggtggaagaagcaaagaggatcaaacaaaaagcggattcactctcaagcctggtaaccaggcatatggatgagttcaagcgtacacagaagaatctgggaaactggaaagaagaagcacagcagctcttacagaatggaaaaagtgggagagaggtattcttttgttaattcattcactcaataaagatgtattgaatgcccaccatatgaataaatatggcaagaagaataatcaaaagctctctgaccaggcacggtgacttatccctgtaatccccgcacttttggaggccaagccaggaggatcgcttgaactcaggagtttgagaccagcgtaggcaacgtagtgaggcccccatctctacaaaaaataaaaaataaaaaaatagctgtgcatgatgacacgtgcctatagtcctagctacttgagaggctgaggcgagaggatcacttgagctcatgagttcgaggctgcagtgagccatgattacaccactgtactccagcctgggtgacagagcaagaccctgtttctggaaaaatcaacaatgaaggcactgcttatggaagaagtaacagttgcagagatcttggtgtgattagctcagttccacccagtcggtcagccctcaaacctaggaataggacctaggcctcttgggtctaattttggtctagctcagtctactacttggcttcaggaaatatctagagtttaaaattatgatttataaaaccgttcctgtccctgatggtggactagagtttctctatatggaatgtgttgtggacttataaagtttgctctgtcccagattgtagaggggtttgctacagcacccctagactctgcagtgaatcacaatgatctgctgtcatgaagagaaatgtgtcagagtgattttgccagcaggaatgtacttcctctaatcttgttctatctgcctttttacagaaatcagatcagctgctttcccgtgccaatcttgctaaaagcagagcacaagaagcactgagtatgggcaatgccactttttatgaagttgagagcatccttaaaaacctcagaggttagtacttcatggttcaggtcacttgagtattttaagtgtatagtcatgaccaatttcctttgaattctcatatgtctctctaagtggcaggtatattgggatattaatagatccttagtaaatatctttctaaagaaaatcttaatgcattaatatttaatgtagtagtaataatagagctagatgtcagaagccttgagttctgatctctgctgggccacctaaccaggccagactagctgtgtgaccataggcaagtcatgtaacctttccagaacctagtatcttcctctttaaagagacgaggttaaactatgtgttctctaagttctctcacagatgcaacataccactactgtacagacatttttccttttcctgtgtagtctggttggttccagtatggaactgatatgtttctttgtggtgataacagagcaacctttgtcactgcatctagatcccaggagatttagatttgtgcctcgcagagatttcattaaaatttcaggcttcttcactaaagcacaaaagagaaacattcccaaaattttggaattttcttcatggaaagtacttctctacccattcaaacctaaccccaattcttatcattggagcttagggcttaaaactctggcttgatgctttggacttcaaagattctacctgcttctgatgcactcttcagtttcaatactcttgcagtgctgtggaactcagggcaggctgattgtcggtttctctaagcaacggagtaattataacccctccaatgcatcttttaagaaagttaattccagccgtaacttcccacaccgtcatccccagtcagtaataacactctttcaggaatttttctttacaacatcagcccctttcactcatttgtaaatttgctttcatcttcacggcagttttttcttttcttcatttcagagtttgacctgcaggtggacaacagaaaagcagaagctgaagaagccatgaagagactctcctacatcagccagaaggtttcagatgccagtgacaagacccagcaagcagaaagagccctggggagcgctgctgctgatgcacagagggcaaagaatggggccggggaggccctggaaatctccagtgagattgaacaggtaaagagaaatcgacatgtgtgttggtgccagtagcaccaaacacaagggtggtgtggagggaaaaagaacattgagcttattttaacctctgaggctcagagccctgttgtggcccatgggagccccagattaaaagactatggtagcaaagacgcatgacagagaatgatgtgtttttttgtcctccgggttttcccaaatggttcctaactctgttcaacatttggtgagcattgaactgagagagaagcactgtctggccgctgaccttcctagtcatacccccagattagcttgtttgaggcagagcttggcaaagtacccctgtccctaagtctgattctctcattattcatctaatttactccatcagggcccggctgccgctgtattttttctatggttgtctttgggatgtttttgtgcctcacccctatctctccttccgtccctggctccttttcttctctcaggagattgggagtctgaacttggaagccaatgtgacagcagatggagccttggccatggaaaagggactggcctctctgaagagtgagatgagggaagtggaaggagagctggaaaggaaggagctggagtttgacacgaatatggatgcagtacagatggtgagttcctgttgctttccacgggagatccctttcaacttgccaaaatggaaaataccttttcaaggctggtttgtgcttatttgtcctcaggtgattacagaagcccagaaggttgataccagagccaagaacgctggggttacaatccaagacacactcaacacattagacggcctcctgcatctgatgggtatgtgaacccacaacccacaaccttccagctccatgctccagggctttgctccagaacactcactatacctagccccagcaaaggggagtctcagctttccttaaggatatcagtaaatgtgctttgtttccaggcccagataactttcggcaggttcccttacatttactggaccctgttttaccgttgctaagatgggtcactgaacacctattgcacttgggggtaaaggtctgtgggccaaagaacaggtgtatataagcaacttcacagaacacgagacagcttgggaatcctgctaaagagtctggcctggaccctgagaagccagtggacagttttaagcagaggaataacatcaccactgtatatttcagaaagatcactagggcagccgagtggaggaaagcttgaagagggggttagagagaaggcaggttgagactacttaagatattgttgaaataattgaagagagaaatgacaggagcctgctctaaggcagtagaatggtggctgggaagatgtgaaggaagattttcccagtctgtgaagtcaagaatcacttgccggccgggtgtggtggctcacgcctgtaattctagcactttgggagactgaagcgggtggatcacccgaggtcaggagttgaagaccagcctggccaacatggtgaaaccctgtctctactaaaagtacaaaaattagctggatgtggtggtgggcgcctgtaattccagctactcaggagtctgaggcaggagaatcgcttgaacccaggaggcggaggttacagtgagccaagattgcaccactgctctccagcctggggaacagagcaagactgtctcaaaaaaaaaaaaaaaaggaaaaataaaaaagaatcacttgccgattttacatttgttcctccccaaaccaaagttataccttgatgtaaccagtgggaggaacttgagctgcttgggtaaataacccagaagaaatgtgatgagagtaggcctgtgagataattttaggaagatctgatggcacagcgtggaagaaaatcaggtttccctacagaatcgctcccaaaagaaaacttattttggttaaatttctggatttaggtagagctgatatcaaaccctcatttggtctgttttatcaagcttggactgcagcagatgtggaactagagattcgtcacagattccagtaacatttaggaaaatgtttggctctgctattccagttcagtagaacaacttcgaaactggatttttctgtagggtgtcatcatcaccctgagatgccaatgtcatctgtgttgttatagtcttgggtctgctttgtgatccaatgagcccaaaagagtaaaatgccctcaaaggattgagaaaaaaaaaaggaaaaaacaaaacaaaggaaaacaaaaccttcccaattgagactttagcagcgttgtttagtgttctaaaaaaaaaagaaaggcaatgaaactaatgagacctgtaaagagaatatgagagagtagggagagcagggtagatggaagctattaaacatttactatgtgtcagatgttttcatggtgtaatatcatttgtcttgtaaaagtcctctgtggtgggttttatcatttttattattttatttcatgaaggactgaactgaggctcagaggttaataatgccccacaggtcatgtagtaaattgtagaggcaggatccaaactgatatctttttgcctccaatgctcgtgttcttttctagtaactcatgccaccttcccatagacaaggttattttgttcccaagcttacttaacttcctctgcatgtcgtaaaatcctaaattcctaaattctccctgaccccaagtgaaagatccatttggatcaacatttttgttacagtgttgtttctactctgtgtgctctcttaagtcctggagcaatatgagattaattgttctaggtataataaactcatgcagtcaaatactatcacttcagctcacatatgtgaggcaacttgaccttgagttcgaattgaccaaggccactcaaacctatttgaactaaatgggtctggccaggtacccttcatactgacattagttttagatagtctaagggtaacacatgcttgaacaaacgtgattttattttaaattggaaataaaataacatctagtcagatgactgctgtttcaggctggaatgatgtctgacatcaatttctagcagctggaatccattccccaagtggcaaagcgtaccttggcctctataaccctgaagctcagccagtttcttaaggtcttctaatagaaaacagcaagatatttcttaagggtggttcagaaagcataatttggagttgattctaatcctagcagtgacctatgttaggcaaatgccttggatagtgctcagtcccctatgaccttcagtcctcttttttttttttttcatagcataaactattgaccttaacacgaaaggaaaactccagacatcacgttgctgaactagatagctcagagtcttgaacagtgttgttcatagcccagtaaataggctagccctctcagaactctttctaggtgatttctaatttaaaataagctttaaaattcatggtatactatttgctctaggcaagtggaaatgggaattagttatgggtatagaagggcacgggtgttcaaggagatctaactacagcttttctatgttaacttgtgtctcattccttgaaatagaccagcctctcagtgtagatgaagaggggctggtcttactggagcagaagctttcccgagccaagacccagatcaacagccaactgcggcccatgatgtcagagctggaagagagggcacgtcagcagaggggccacctccatttgctggagacaagcatagatgggattctggctgatgtgaagaacttggagaacattagggacaacctgcccccaggctgctacaatacccaggctcttgagcaacagtgaagctgccataaatatttctcaactgaggttcttgggatacagatctcagggctcgggagccatgtcatgtgagtgggtgggatggggacatttgaacatgtttaatgggtatgctcaggtcaactgacctgaccccattcctgatcccatggccaggtggttgtcttattgcaccatactccttgcttcctgatgctgggcaatgaggcagatagcactgggtgtgagaatgatcaaggatctggaccccaaagaatagactggatggaaagacaaactgcacaggcagatgtttgcctcataatagtcgtaagtggagtcctggaatttggacaagtgctgttgggatatagtcaacttattctttgagtaatgtgactaaaggaaaaaactttgactttgcccaggcatgaaattcttcctaatgtcagaacagagtgcaacccagtcacactgtggccagtaaaatactattgcctcatattgtcctctgcaagcttcttgctgatcagagttcctcctacttacaacccagggtgtgaacatgttctccattttcaagctggaagaagtgagcagtgttggagtgaggacctgtaaggcaggcccattcagagctatggtgcttgctggtgcctgccaccttcaagttctggacctgggcatgacatcctttcttttaatgatgccatggcaacttagagattgcatttttattaaagcatttcctaccagcaaagcaaatgttgggaaagtatttactttttcggtttcaaagtgatagaaaagtgtggcttgggcattgaaagaggtaaaattctctagatttattagtcctaattcaatcctacttttcgaacaccaaaaatgatgcgcatcaatgtattttatcttattttctcaatctcctctctctttcctccacccataataagagaatgttcctactcacacttcagctgggtcacatccatccctccattcatccttccatccatctttccatccattacctccatccatccttccaacatatatttattgagtacctactgtgtgccaggggctggtgggacagtggtgacatagtctctgccctcatagagttgattgtctagtgaggaagacaagcatttttaaaaaataaatttaaacttacaaactttgtttgtcacaagtggtgtttattgcaataaccgcttggtttgcaacctctttgctcaacagaacatatgttgcaagaccctcccatgggggcacttgagttttggcaaggctgacagagctctgggttgtgcacatttctttgcattccagctgtcactctgtgcctttctacaactgattgcaacagactgttgagttatgataacaccagtgggaattgctggaggaaccagaggcacttccaccttggctgggaagactatggtgctgccttgcttctgtatttccttggattttcctgaaagtgtttttaaataaagaacaattgttagatgcctggggtcagtttctgatttactaaactctaagcctatgatggtaccaaagtaatggaaatgaaaatgccacagaaatggcaataggtcctagagttagcatcttcagttcccacttctgagcatcttacttcgcccattccaaccatacaggattgatgatgctgtcaatgagatttttatgaggtttaactgatgctgtcttctaagcataaagctttatttctagaaaaactctagctgggtgggggggatatagttaatattcttatctttttcatcagctataaaatgaaggtaaaattaatagtttgtggtgcatatgtcatgctttttaagaagttaaaatgtactaaattaagatcttgaattggtcatctacgcaagcggctgaggaaacaattctgcttctgtccattgacccccagattctgataggtctggtcactttgctttaccttctgtgaaaatgaatttgtaatcctgtcttggcatacccaattacacattctacagatctcttgctataattaacgaccagtgcccagactccacagtcatttcagaggccctgccatttacatgtgacttctaaggttgcctgggggatggagggttgtggccattccagctggttgtcaccagctgatggaaagagaaaagaacatggaggaaggatacacaggaaagccaggcttgggagggcctcacgtgccatggtccaaaacccagcaaaacaatcacatctgccatgcaaaggggtctggaagatgtagtcctttgttaggatgccacttcacagtgacaattctacattatgaaaggagaaaatgcattgtcggtgattggctgtctcttccaagtgtaagattagacagtacatgttctaggaaacttggtgagggatcccattagttaataaccacggtatgtgtaatcatataaggattcttcaatggaatagattgttttaaaagtcgtaagaggctgggcgcggtggctcatgccggtaatcccagcactttggaaggccgaaatgggcggatcacgaggtcaagagattgagaccatccttactaacatggtgaaaccccgtctctactaaaaatacaaaaaaattagccgggcgtgatggcgggcgcttgtaatcccagctacttgagaggctgaggcaggagaatggcgtgaacctgggaggtggagcttgcagtgagccaagctcatgccactgctctccagccagggtgacagagcaagactccgtctcaaaaaaaaaaaaaaaaaaggtcgtaagactgtcttccctgacaaatgggagatgatacctgaggagagatggggagtagaaaaatgacttatggtacttcccttgatgtacaaataattctctcatttctaaggacctgaaaagttatcccttagaagagagaaggggatgtggcttccccaggatctagcctcatgttgtcagtccttaacctgacgctgccaagataaggaagctttccttctgatttttcgtcagtattagtagttcatagtgaaagctttcttgcacttctcctctgagagtttatggttaattatgctgttggtaagctattacaaatgtcatcatctactttaactgttagggacctctgtttggagaaaggggtggaaatgaaactgcccatagactataacttcttagcagatgtatttctggtcttctccaaggatgtggtttcttttcagtactctccagtacttctctcagcctcttgggaggctggagaaaaggataagaagatgcttagtaatattcaatgttttgaacaagtctcaaggaccaggaatgtgtttattgtgccttcttttaatgttttgcatggtaatgggaatgttatggattcttgctgtggttcaattttcccacctggagaacatagattagaatttttctctcccttcttcatactattggctacatggaactttctaagaaatccaaagatccaaa

SEQ ID NO: 766 - DNA, 64515 bp, Homo sapiens
tgtggccacgtcctcccgtcgccctgtcaccatgaacactggttcctcgcccctcaccggtgtcttgatgtaggtgttggtcttggccctcaaggccttaatcttgcagcctgggatagggcggggaaggagagagacaaagaaacgcacacagcaaggtttgtgctgggaccaataaattcctgatccttacccaaatacctagcctcccaggaacacttcagtctaccctttgaaatgcccactgctgcacacacagtccaccctgacttgaagaaaccatttatcagatctcagatgtgcctaatgtctctctcagccacagatttcaaaatgtactaactttccctgagttccattcagggccctccaaattcattcactcctcaaaacccccaaataatcactgaccctcccatacaagctggtaactcaaatccattcacaaactacactcctttctcccaacatttgctcttccttcaatttctctactgattcctggctactcacaaacttccaaatcacttaatcaccccccacatctgtcactgaccctgatctttccacagaaccccaatgtgctcagtaacctcataatctactcatctgacccttgatcattaaaagtgtcctccaaactacccagggaccactgaagtctatctgctctatgaccgccccacatgccttccactcagtagtttctctcagtgggcctcaaattcatagcgagtttgcagcaacgagtagagtgtaggggactgggaaaggtctgacaatcataagttcaaggaggaaaggaggagtatggagttaaacttctgtgtgagggaacagtgcccaaccccgtgtcactcttgtccccctgtcccctgggggcaagacagctgagctgggctggggctgagtacggtgagggagaggtattttggacccacactcctgctttgaagtagaagtgagttaaagctgggaggttagggaaaggcaggaagagaaagaagaaaaatgagacaaagagagacaaagagggagaaggctagagagaaaagtaagggctattctgtttctaaaagctgccgacctgggggtctggacaagtccctctcctccttacccaccttcctcttccctgctcctagcttcacacagagcttccaagactcatacccttttgggaagcacacgtcacgtgtgtgagttcacacacatgtacctaagaggtgtgcctttatctaaataatacttatggggccaatctaatgtacacttttatacacctctttcacacacacatcaagtccctgtgtttcggcctttcatacatcccactgtccatccccatcctccccagcacacaaacagcacattcctatacacacccgcacccatgactttcacccccaatcacatatagacccactcacacccttctctgagcacaactcactattccccttctctctccaaccgaaaccaagtggtcctacttttctgcctctgccccaaccctccaacctgagacctgaggtgagctcattttttcctccttcctccactccagatggctgcttcttcaacgctggcagattggggggtgaggggaagagagtaggttgggggaccctccctcactttttttgtttgtttttttttgagatggagtcttgctctgtcacccaggctggagtgcagtggcataatctcggctcactgcaacctctgcctcctgggttcaagcgattctcctgcctcagcctcccgagtagctgggatcacaggcacctgccaccacgcccagctaattttttgtattttttagtagagatggggtttcaccacgttggccaggctggtcttgaactcctgacctcaggtgatccacccgcctcggcctcccaaaatgctgggattacaggtgtaagccaccacaccctacaccctcccctcacttttaaaagaccttaagaaggaaaatttgcttgtttcctcttgtcttcagacctcttagcagttatgaagtcctacctgttgtccagcccacatccttgctgctttaatgtcagtaaatgattgttctattttcgaggtatggagggtcacaaaacagtgaactcccctctcctaccatttctactcacatatcgtttgatgggcacctgggttctggccgtaagttttgggtccaaaaacttaaatgagagctaggtatctttagcggttggggttggggtgaggaggacaggccaaggcatcgagtaagaagaaacgctagaggcctggaggtgcaaagctggtggtgggtctcttcctgggttctgcaaccccaaagaagcatctcttgaagggaagacccactgggcttcaccttcctagaggtcaaacagaggagcactaacactgcagcaggaggagggaggttagacaagagggaggacttccatatacttgactgaggggcaggcttatcttttgtgaataaaaatccccttacttttatgagggacaagcccatctgatgcggaggcagaagaggaaagaatgactccattaaattccggggcctcccaagaccacccccacacccaagaaaagatagcaatgtccgtccccacccaattccagggctttggatccccagtttctgacaagaggaaatccaactttctaaatcagaaatctcaagagatggagtgccccagggggatgagggctgtgcaggggagtggcatcttcccctcctccattctggatctctccgtgaaatccccctaacccccagcactcccagtggataaggtgggatgtggagtaggggcccccctggcccgcctccccttttcctctgccagaagctggcctcctcccgcactcccagccggaatgcagctcctctattgttccccactgtgggacagctcctcccccaccccacacctccccagcccagcctctttgcaatttccaaatcctgccccccacactctcctttgagaagccaggagagggaagggtccccaagatcccgtctgctcaatttggaccttcaccaacacccccactcacccacccagggatgctggagcagcagagggtgtggtaccagacatactacgctggattaattctgcaccccctcccaacacacccagacacacgccctccaccaaatttccaggtgaaggtttcttaccccccagcattccccctcctaccctgtcctactctttcactaccagagacccctctctaggcctctggcccaaggccgtggccagcccagaacaaaagccagagagggaagaggagaggtccaagccaggacgtagcacttccttggagacaccccttccaaaaccccagagacaatccaactttggggtgtgggtgaccacaggaccccctcctctcagcagcccccctcaccgcctcttccccaggctgggaccctcccctgggccacacccccttccattcctacactcagcccaacaaagagacagatactcagtctggcttcgagggccaggtctcccccaaagtctgtaactccaggcggctgggggccccagggatgccccctccccagcctaggagcagataccagagtacaggcttctgagtaactctttgcacattccgtcagtttttctggttaggagtggacaccccctcaggacagcctccctggattgggagaccgatcccctcccctttccctcttccagtgcgaggatatttctttgtctaaaggcagagtcctgggggaggaaggatctggagaaccgtcccgactaggggtaacggggaactttgtggcactttgaaatcagggtagggggcgggtccccctttgtggggaagggacagagccggaggcgggcaagaagggaagaaatgaactttccgcgctagggacgagggtgcccccactacagtccctctcagtggtcccggcgccccgcttaccttgcctgcccacgatctcggccacgtgctcggaggtgggcacgggaacacactccgtggtgttgctgctgcccttcaggcgcagctcggcctctttgtagagagcgcagagcttggcgtcgctcgcccctttgggggcggtggggggctggggcgtctgcgctgcgggggccgccgtcggggcggccgggggcgccgcgggcggcggcggcggggccggctgcgggggggcggccggctgcgcgggggcgccgccccccccacctcccccgtcctcgcccgccgtgggggcggggggctcccccaaacccaggaggcagagttgatcgagagccagctgaagggcgcgctcgtcttccagcagccctcggtccttagcgcttcccccgaaacatcctagttctccaaagcccccatttctttccattattccagataccactagactaggcatggcgaaacaaaagctgggggagagagagagggagagagagagagagaggtggtggaagggaaaagaggagagaggaggggaggggagaggagaggagggggtgtgtggggaggggggaacaaagaactggggaggggggaagaaagcgagatagaaagatagaccctccccctaagcccccctccccaaacaccctgtaacccgactcccctcgccccagcccccggggtgggggtggggggaaagagaagcaaaaccaagaaagcagatctcctctcctctccgggggtgacggggggcggggggctgcaggatctctgcccccacccctcccgcctcggacctgggagtctctagcccccgctgtccaggcgcccccgttaggctcccgcaccgagccccagtccgggagcggcgctcagtggcccccaatagagcccagccccttccagcgctcaaactcttttgttttaaatgaactggatggagcagcatgaaactgacgggaggggggcgcgccgggggcgcccggggcatgccgggagttgtagtttcccgcccttgggggcgcggggacaaattccttgacccgaggaggatagggatgtggccttcggtctttcctcgcagctccggggcaagctaggagtgggatggaagtcgaggtccctaattttttaaggggagggtgcggggagaaggggtagtatgcggaaacagagcgggtatgaagctggctaacgccgcgcgccccctcccaggacccgctcctgccccgcgccggccggtcctgggggcccgcttttttatggaaatgaggagggggggccggggccgggggcggggagccgggagccgtccccgctcgctcactgcggctttctctctcgctcccctctccccgctccctgccgcgctcactctccgcttccccctcccgctctcccagagtcgatcccggagcccggccgcggggagaggttctcggcagagaagacaaagcccgcagcagcgatggggggagagctgggctctgcgtgttgtgggggccaggaaagggtgccaggctggggctggaaccccctggcaaaggatggggtcccctcatccctaaacagcaagccatctcccctcgcccgccccccgcccccccagtctcggagatctcagaggcaccgactgggaggtgagttagttcacgtccttctgctcggtggagggggtcgggagggcggtggagtgatgaagtgcagaggttgaaggagtgcagggacagaactgggggtcggacggagagtgggcaggcaggaaaagtcttaaaggcctggggtgacttaaccgtttggggtgagggccttgagctttggatatgacaggagggaggagagaccaggatggactgggaacccaggcttccttcaggcctgggctgtgaatacagcttggggtgatctgtcctttagcactcatcgtaatttccactctgtttcctccacctctctcccattgaaaacctattcagggccgggcgcggtggctcacgcctgtaatcccagcacttcgggaggcagaggcgggtggatcacctgaggtcaggagttcgagaccagcctgaccaacaaggtgaaacctcgtctctactaaaaatacaaaaattagccgagcatggtggcagacgcctgtagtcccagctactcaggaggctgagacaggagaattgcttgaacccgggaggcggaagttgcagtgagtctagatcgcagagtgagactccgtcccccccacaaaaaaacaaaaacaaaacaaacaaacaaaaaaacccattcagtcccgtttgactccggaaattcggtgagaatgaaaataagtttttaaggcttggagagttaggcacttttagagtttcaggaaggtggagtgtaatgcaattttttcttctccctttaccccatattttctgcatttattttatatcaccctttttatgtctggatctttcccaagggaagaagggatggcactgcagcttgagggctcgaggtcagacttgaagaagaacttccataaagagttttataatagtgggtgggtgagccacagtggtaaggtgtccttttctggagtgacttgaaaaacaaaaatctgaactagtttgtaagataaagtcctgctgagaggcaaggaaacagatgaattgacttcacagacttagcaatgtggggccttgagggctgagctgtttagtccagttccctaaactgtttcttggaaagagtgaatttgcacactaatgggagtgctggaacctgagctgaggatctcagaaggtcggggggtggtgggggcagttggcacactgcagggatttttttcctttgctaggcagaagatccagggaaggagaaccttgactgaggaacccgggagggtcctggagttggggaagtttgccccctggactggggatttaacataagatcaacagtaaaccttattgtgggatttgatgctactgccaccaagcaagagtgaaagaggaagaattagagagacagggccctggagagtgggctatttctgcctcttgtcccctccgtctgccccaggaacctggattgcagagactgtggtactggggaccatggggtctctttgggagaaagtttttgctttgtggaccaggtgactatctttcacataaatagaaatagcaaacagttgcataggtcttattgtgtgctaggcatttttgtggggccaccagctggctgagccttcctgtccccactgaaatgagattccccccagactcccaccctgaacttgcgctgcctctgctttcctcctcactaagctaattaaggcaggaggttaatgaccaaagaagccttggggatttggccagggaggaaaacaaagggcagaaacaagtatgtgtcagtggggagggtccagctgctgaatggggaaggggctggctgaaaggtggggtgggcgaggcagggtccctactggacccacttcgtccctgacccaccaacaagaatgaatcagccctctgggtaagttaatgtccaccctcagggtcccactgggactccagacaaatttccttcacagcagatgtgagcctggcacctggagggcaaaggatatgtgtgcgaatgcagttaggtgtgtggcatggtgtacatgtgagagtgtgtgctgcagatcatgtaggagagtgcccaggtgcagaggaggcccagggtgggcaccttgaggagctggattctcagagtgttttttacgaatccttcgctctctcccggaggctggtggcctcctttgttcaggagaccccctccctcaactgagaaggtagatttctgtatacaggctctccttttccctgcttgcctgatccagaattatggcaatgagagcagaaggtcttacttaaacaatactccccactctctgccttatgaccagaaaggtgtagaggtggcatacttctccctttcaggactttggaggacagcactatgtctctcatcttcatcatggtccccaaccctagctgcccagaacctagcatgcagccctgcccagagcagaggctcaataggggtatgttgagtgtaactgcatttttaaaacttcatggtgtcaggaggaaagagcaggtctccaaagataaacatgctgcttattctgccactttggggagtcatttattgctaagcctcagtttccttatctctcaaatggaaataataagccaaggtctggcagggcatggtggctcgttcctgtaatcccagcactttgggaggccaaggtgggtgaatcacttgaggccacgagttccagaccagcctgggcaacatggcaaaaccctgtctctactaaaaatacaaaaattagctgggcatggtggtgcacacctgtaatcgcagctacttgggaggctgaggcatgagagttgcttgaaccaggaagcagaggttgcagccaagattgtgccattgcactccagcctgggcaacagagggagactccgtctcaaaaaataaaataaaataagccaaggtcctaacacagtgcctggctatcttaggtgttcaatcagttttagtttcctggccctggttgttctccccttgtggttgactttagccagattgtggtcttcatgaattttcattcattcgttcattcattcagccagccacttcctattgagctcctgggatgtgccaggcactggaggagatttattctgacccatcataggtcacttgaagtcacttctaggtctagactcgctgaaataaggtcattctaaacaaacagcaaataattctaaaaataattcctgttaagccctggaatgcaggtgacctctgactctctctctctctctctctctctctctctcttttgtctttcttacacaagccaggcttctggcctcatgcctggggaacaaaggaccctgttgagttgtttagtacatacacacacacaagccaggctgcagggcaggaaaggtgacacagtggagagtccaggattcttgtggaggttgggggaggagtggggtggatgatccagactgtgtgcttgtctgtgtctggagttgtatcccttcttcttccttttttttccttttgagacagagtctcgctctgttgccaggctggagtgcagtggcacgatcttggcccactgcaacctccgcctcctgggttcaagctattctcctgcctcagcctcctgagtagctggcattacagcatgcaccaccactcctggctaattcttgtacttttagtagagacggggtttcaccatcttgaccaggctggtctcaaactcctgacctcaggtgatccgcccccaccttggcctcccaaagtactgggattacaggcgtgagccaccgcgcccggccaggaattatatcccttctttcctctgagcacttctgggcacctgttatcactgtctgaacactcagtaccaagggatgggggtgcacacctaacacttgcccctccttagccctattctcagaaccctgagggagggagacacaggaggctgccaccaaggctgccttaccaagcagactggcccttaaagaggtcatctcccccatcttcatacttctctcaggatgccttctctatctgtcctagttagctgagccttctctcccatgtataatgagattttcccattttcttttctttcctttttttttttttgtggggggacagagtcttgctctgtcacccaggctggagtgcagtggcgccatctcggctcactgcaacctccgcctcccaggttcaagcagttctctgcctcagcctcctgagtagctgggattacagatgcctgccaccacgcccggctaatttttgtatttttagtagagacagggtttcatcatgttgcccaggctgatcttgagctcctgaccttgtgatccacccacctcagcctcccaaagtgctggaattacagtcgtgagccatcgcgcccggctcccattttcttttcttttcttttctttttttgagacaaggtcttgctctgtcacccagactggaatgcagtggcttgatcatggctcactgaagccttgatctcccaggataaagtgatcctcccacctcagcctctccaatagctgaaccacaggcacatgctgccatacccagccaatttttaaattttttgtagagatgagatctcgctatgttgcccagtctggtcttgaactcctggcctcaggtgatcctcccacttcagcctcccaaagtgctgcgattataggaatgagccaccatgcccagcctttctttccttttttttctttctttcttttttttttttgagatggtgtctcgctcggtcaccaggctggggcgcagtggcaccatctcagctcactgcaacctccgcctcctgggttcaagtgattctcctgcctcagcctcctgagtagctgggactacaggcgcgcaccaccacacccagctaatttttgtatttttagtagagacagggtttcaacatgttggccaggatggtctgtatctcttgacctcgtgatccgcccgcctcggcctcccaaagtgctgggattacaggtgtgagccaccagcccggccccagcctttttttccttaataaccctttcttgtgggaagtctgtgttgctatctaaccaccgtcctttctgctaagagtccagacagttttctctcctttgatagaatgcactcaacacattaattaatttaatttaatttttttgttttcttttttttaaccttataccagcagtccaaacctcactagcattaattaattttaatcaatgagaatatggaataaaattctgtaggccacacaaaagaaatgtgagacttgatccccaccctcggtaagacacagaaactggcctgcatgacccagagaacatgggtaagcaggattaaatgtaaggacaaaatggtctttggggtagagcacggtggctcctgcctataatcccagcaccttggggccaaggtggaaggattgcttgagcccaggagtttgagaccagcttgggcaacaaagtgagacctcatctaatttatttttattttattttatatattttttgagacggagtctcgctctgttgcccaggctggagtgcagtagcacaatctcagctcactggagcctctgcctcctggattcaagcaattctcctgcctcagcctcccaagtagctgggattacaggcatgtgccaccacaactggctacttgtttttgttatttttagtagagatggggtttcaccgtgttagccaggatggtctcaatctcctgacctcatgatccacctgcctcagtctcccaaagtgctgatattataggcgtgagccaccgcacccagcctattttattttattgattaatttatttgtttgtttgtttattttgagccagggtcttgctctgtcgtccaggctataatactgcggcatgatcttgactcactgaaacttcgaactcccaggctcaagtgagcctcccacctcagcttcctgagttgtttggtctacaggcatgcgcaccctgcctggctaatttttgtattttttgtagagatggggttttgccatgttggccaggctggtgtcaaactcctgagctcaagtgatccgcctacctcagcctctcaaagtgctgggattgcaggcatgtaccaccatacccaacccttgtttatttatttatttatttatttatttatttttgagatgaagtcttgctctgttgctcaggctggaatgcagtggtgtgatcttggctcactgcaacctctgactcctgggttcaagcgattctcctgcctcagcctcctgagtacctgggattacaggcgcgcacccccacgcccagctaatttttgtatttttagtagagacggggttttaccatgttggtcaggctggtctcgaactcctgacttcatgatctgcccgccttggcctccattgcactccagcctgggcagcaagagccaaactccgtctaaaaaaaaaaaagaaagaaagaaagaaagaaaggtctttgggactcggagggctacagaggttgggggagagaggtcactgtgagtccttctgttgttgtggatctgatctccaagggctttgcaggctcagcctaggtttggagatggacaaacgtctctgcttctcccctgggactacactggcacttcctctgccaggtcccctgcattgtctgatttccccagggagagtagctcagaggggctggggtggagtctgggccccttaggacagctggttgatgaggcccctctgggacttagggctggacccaggcgtccaggaggcgggtgatactggagctgtgacagttggtccccagattccacacccagtggcgccagctctggtttcgagctgcggtgagggagggggaggggcacctggtgccagccaggggctggatgctgtcttggggcagggagggggaggcagtaaacatgtccttcctaggttgttgaggattttctaattgccctctctgtgccaggcactgtgcaaggtactaacgagattctgcaatgcaagatgcagtctggcacagatgaattgacagcatacagtatagaattagaatgtcagagctggactagaagttgaatgaatgaatgagtaggggaatgagtgaatgaatagttcatcagttacctaatgcactcattttacagaggagactgaggcccagagaacccgagtcctgtgactcccttctgctttctgatctgtcatgcttcctttttcaggaaagggaagcaaaaggcagagagaggggtgggaagggacttgacgtttcctgagtgcatgtttggtgccaggctctgttctggtcttttcagacttgatgtaattgtcttcacaattctgtgaagatggacttggtgtctctgcttcacatgaagggacctgaggttcagagaggctaagtaactttcctaggtcacagagctggtaagtagagactttagtgttcaaaaccagagcagtctgaccccagagcctgggaccccagaggtagacagtgatactcagtgagtgcttggagcccacagagggtggagggagtggttcctggatgaagtagatctgaagggtgggtgaggttcatttgaaaggcgagaattggaggcatgtctggaagttggtgctggaggtgcccagggagacttgctggttgagcaggtggccggcttgcatggatcttggggagcaggggacaggttcaaagaaacacatctttaaacattggccaccaggtggcgccgcaggccaattcctagaagcggctccagcctcagcgccctcactagggcccaggtatgacttcgctgctcagccagggctccatgctcggcttgcttcctcaggtgtcatctccagcttccgcttgcccctggcttctggcatccaacacatgggggataatgatgctaccagtcgtttcctgactcgggacgaacacccaggtagctgagacctgggaatccccgtgggtctgagcagctcccccggtcacccggagacccctccagtcgcctaaacctggcttcatgtccagcgcccttctgagtttctgggagacactgttcagaggacaggctgaggaaacaggcatttgagtccaactgacctgggtctgaagggaaataataatatctaccttgtaaggatttaaaacatttcatctatggccaggtgcggtggctcacccctgtaatcccagcactttgggaggccgaggcgggcagatcacctgaggtggggagttcgagaccagcctgaccaacatggagaaacccggtctctactaaaaatacaaaattagccgggcatggtggcgcatacctgtaatcccagctactcaggaggctgaggcaggagaatctcttgaacctgggagacagaggttgcggtaagccaagatcgcgccactgcactccagcctgggcaataacagcaaaactccgtctcaaaaacaaacaaacaaacaaacaaacctttcatccaataaatatctatcaaatacatgctgtgtcaggaactattctaggccctgaatacatcagagaacaagatagacaaggtccctacttgcacggagctgatactctactggggaggaaggcagacagtagtcaagtagataatgtactttctggtagtgatcatcactgcaaagaaagataagccaggatatgggggcagaaaggtttgaggtggctaatttagaaaggatggtcatgctatctggccaggacaacatagtgagaccccatctctacaaaaaaaaattttttttttttgagatggagttttgctcttgttgcccaggctggagtgcagtggcatgattttggctcactgcaacctccgcctcctgggttcaagccattctcctgcctcggcctccctagtagctgggattacaggtatgcatcaccacaccgggcaaatttttgtatttttagtagagatggggtttcgccatcttggtcagactggtctcaaactcctgacctcaggtaatccactcaccttggcctcccaaagtgctgggattacaggcgtgagccacagtgcccagccaaaaaaaattttttttaattagccaggtgtggtgagttgctcttgtagtcttagctacttaggaggctgagataggaggagcacttgagttcaaggttacagtgagctgtgatcgtgccactgcactccagattgggtgacagagcgagatcccatcactattcaaaaatttacaaaaaggctgggcacagtggctcctgtctgtaatccaagcactttgggaggccgaggcaggtggatcacttgaggtcgggagtttgagaccagcctgggcaatatggcaaaaccccgtctctacaaaaaatacaaaaattagctgggcgtggtggtgggtacctgtaatcccagctacttgggaggctgaggcaggagaattgcttgaagttgagaggtggaggttgcagtaagctgtgattgcaccactgcactccggctctagacaacagagcgagactccatctcaaaaaaaaaaaaaaaatgtgatcatgaaatgcccctgataaaagcaccatcttagttccccgttgccatcagattcacactccttagtgtggtgatgatgtccctcttgtcctggccagctcctgcccacctctccagcccatcctgctcctccttcccttactccagccacatggactttctcctttctttcttttcttttctttttttcttttttttttttttttgagacagaggagtcttgctgtgtttatgctggagtgcagtggtgcgatctcggctcactgcaacttccgcctcctgggttcaagcaattctcctgcctcagcctcccaagtagctaggattacagatgcctgccaccacgctcagctaattttttgtattttttgtagagacagtgtttcaccatgttggccaggctggttcgaactcctgacttcaggtgatctgcccaccttggcccccccaaagtgctgggattacaggtgtgagccaccactcccagcccacatggactttctttcagggctttggcctgtgctatcatcatctgctattccctgacccttcacctggctaatgtttgttcatcttgcaggactcaatttatatgtcaattttttttttttttttttttttttttagataggttctggctctgtcacccaggctagagtgcagtggcacgatcttggcttactgcaccctctgcctcctggctcaagccatcctctcacctcagcctcccaagtagctgggattacaggcgtgcgccaccatgctcagctaatttttgtaatttttttagagacagggtttcaccatattgcccaggctgatctcaaactcctgaactcaagtgatctgcccgccttggcctcccaaagtgctgggattactggtgtgagccactgcgtccaactacatgtcactttttcctagaaatctcccctggtcacttctggatatcccttacaattcatcatgctctattgtaactgtatgtttacacttctgtttccccagtacacgggaagctctttgagaacagggattggatctagtctactcctgtattctcagcacccagcacaaagtaggtgcttaataaatgtttgctgttcggaaattgtgtatgctcatccatccttccctcttgaacaccctctcacccatatattgccaaatattccacttctccctctgcttttctggcatacctttcactcccacatccagctccatctctcctctccccttccatccccactcctacacctgggccctcgcagcctgccctcatctgatctccaaggggctactgtctgcatgaggtttagtatatcctgtcactgggttcctccactctccagcacctggtctggggccgtacacagcaggaactccatagtgttgctaactcactgacatgacttggtggatggctcagaagggatccctaagcatgcatacacctcctctcagtcaccgctagtaaaatgagtctatcacgagaagtatacatgggtcacatgctcctggccaggccctgtctatcctctagggctttgcacacactgttccctctgcctcgaaccctctctctcattttggctatctcccactcatccttcagacctgagctgaagtggaggagtcatgtcttctctttttttgagacagtcttgctgtgtcacccaggctggagtgcagtggtgcagtcttggctcactgcaacctctgcctcccgggttcaagtgattcttctgcctcagcctcccgagtagctgggactacagaggcgtgccaccatgcctggctaatttttgtatttttagtagagacagggttttaccatattggccagggctttggcctgtgctatctcaaactcctgacctcgtgatctgcccaccttggcctcccaaagtgctgggattacaggcgtgagccaccgcacctggccaaggaggagttgtgtcttctgagaggccttcctgaccatgctgatggtcttacatatacccccaagtctgctgtggcactcagtatttacccatttgttagcacttagctcctagtgctttctttttttttgatggggtcttgtgctgtcacccaggctggagtgcagtggcatgatctcggctcactgcaacctccgcctcctgggttcaagtgattctcctgcctcagcctcccaagtagctgagattacaggcgtttgtcaccacaaccagctaatttttttttttttttttgagaacggagtcttgctctgtcgcccaggctggagtacagtggcgtgcactcactgcaacttccgccttgctggttcaagtgattctcctgcctcagcctcccaagtagctgggactacaggcgcacgccaccatgcccggctaccggctaatttttgtatttttattagagatgtggttgcaccatgttggccaggctggtcttgaactcctgacctcaggtgatctgtcctcctcagcctcccaaagtgatgggattacaggcgttagccactgcacccggccaactcccagtgctttcaaagccagtttgtgtgttcatgttactcggactgatcgctctccatgaataagggatgtgtctctccaaaacctagcatataggaggcattcaataaaaatttattgagtaaatgattgattgaatgaatgaaaggaataaaatgaccatgtgatactgaatgagtcactccccatctcagtttcctcttctcaagtgattctcctgccttagcctcctgagtagctaggattacaggcacctgccaccacacccagctaatgctttttttttttttcttttttgtatttttagtagagacggggtttcaccaggttgggcaggctggtctcgaactcctgacctcaggtgatccacccgcctcggcctctcaaagtgctgggattacaggcgtgagccactgcgcccggtgtccaagacacttctaacgccaacatccttgtactaggccctcttccagctcccccaggagtctgggggttagaggtcaggctgctccccactctattacctccccacacttctaattaattcttgtgttcagtcccagaacctggagagttacactcaggctgcctggtcctgcttattgcccatatcctagaggcacttgcatgcccttccaggcgggtaactgtacatgtctctcccaggcagccttcacagactactcaggggtatggattggctccagctctgacactcagacctgagcagaggcgtgatctactctggcctcctgtgtttctgtgccccaccttcccacactgcccagggctccctgagagtgatgctgagtctagtctcagcttttatgttgctttgcttttgacctctgacccaacacatgcctcctttccctctgaagtcttgattttctccctggcttttctccaccttctgggtgttcctttttggccttctttgcccatctctcctcctctgtctacacagccaggggctcccccttccgtttcctctgcctggaacacacttgcttctccctttctgactggctattcaagcaggatcctgtaggtgggtggcagtgcactgtgtattacctgtgagccctatgcaaattaccgcacatctctgaacctgttttcccatctataaagtgaagctaatagtagcaattacctcatgggattgttgtgcaattagtgggaagaggcatgtaaagtactgacatactgtctagtacacagaaagtgcttaataaatgttggtgattattatccaggactcagcttaatcatcccttcctcaggcaggcctgccacacaaccgcagaccgggttaggtgccgggttttctgctccccagcgtttggaggcactcatcacacattaattactttatccatgaagatgaaagctgtctttggcacccagatggtactgagtaaatatctgtgaatgaatgaatgatgtggaatgtctcctctggaaggacacagtcagggcctcctgccactcaggactagcctggatgcacccacagggaaggagaaggtggggctggtctccgctgggccagcaggtggcgccagggcctgtcggtctctccccttggccacctcccttgcgcttgctcatctcatgcccaggcgctgagggttctcagctggggcaggagagatggggtcctgaggcctgggtgaagttccaagccctggggctcgggggcagactctcgctcacccctcccagaaagatgttttcctaggggatgtccagcctaacacggcagggaaggaagtggtggtcacctgggaaaggggccaacctgagaggttgggggtcctgatgaggctgctattctcttgaggacatgaaatgagaggcggtgaagtcagtcagtgagtcaaaagctgagatctaggaaccagacacaatgtgggagaagctgcggtgaaatcaatcagtgagagaggaaggggaggcccggtttccatgacaacggtagtgtttgtggcaagctggggactcctgggtccccagggcccgcaagcagtgattcaccacaggaaagggaaggctgcagagtgacctggtgctggggaccggatgccttgtggctccttctcactgctgagcatgcattcccccagcccaggccttggatctctgctctgccagctactggcagggaaactgagggatggcagaactgagccccaataaggggcaggcgctttgctccacgccgtacatgcacatatcacttatatcacttattgctcacaacagtcctatggaattaccgttatccctgttttatcaaagaggaaactctcagcctggcccacggtgccatgggcaggacatgagtggcagagccaggattggaacccaggctagcctgactctttaccatgcttgggaaggcccagaaagcagaaaaggaagagcaggagcatgagagttagaggatggttcagaccccagaggagatggaccccaaggcccctagcctccctgcctgccctgccctatgcgagcccaacactgatacggaggaaagctggccaactgcatggcctaatgtgggccagaacctgggcagccagcctacctctcactctcctccaagcccaagagagtaggccccagttccagtccatccaactggatggtagctcccccaccgttttctctctgccctggtcctaggggcaggggtgcgtgtgcgtgtgtgcgtgcgtgtgtgtgtgtgtgtgatcatcatgtctacaccacccaccaccatcacccctatcctccagcttctgctatagcctgggagttcccagccttttagtccctgtcaggatagtttcattcttgttcagctttggggcccacacaatttcagtacaaaaggggtatgcccatctcaccctgggccttgatagcatgcaagagcatagttcaggccctcatcatctattcccttgtagtagaagggatggaggttggaaagaccttagaaatcttccagtctggttctcttgttttgaaggtgtgaaagctgaggctcatagaaggggagcaatttttctgaggtcacagagcaagttaatggaagagtgaactagattccctgtccacagacttcaggttctgtaatcccagaaaggacttcttgaatttggcattgagttcttaggatgggagtcaggtagatgaacagatggagtgagacagatgaaattggataacctagcataaaatgccatgtgaaaagaaggtacgcaactcatggcccgactgtctaccatgttacatcaggaataactgaggtgagatcatgggaaagacttctcacatatgtatgttaggggtacaagatctgtggtcaaaatgggctgtgtgatcccagacaaatcacttaccttttctgagccccagtggtaactcaggataccctacctgcaggcttgtggagaggatggagggggtggtgggagagtacttgtgaactgtggggtgacatgaatgttgtcagttgtcagggaaggcaagtcatgtctagtgggactgagatagagctaccctgcagtgcaaaggtaaggggtaagccatgatgctcacccctcccacccccatccttgggagagaaagggaggaacataaacttccagtatgcttgatacaagcaacagttctccctgggggtgggcagcaggttcctgtagacccctggggtgcccagaggctgtgggaagctgagcactaattagctctggctttctaatcgggcttaattgcctcctcatgatgggcaattaggaagctgcatcaattagcacagggaggtgacaactcagctggggttggtcagggctccccgttggcagggagggaggcaggcaggcaaaggctgccccactgtcagccccttccttccctttgaaggagagggccctggagccctctccttagcaattaggccttagttccttagctcctaggagctactagccttctaggcctggattgtggcttttctggccttggtttattcaccttcactggctctctgacttttctgcccagaggagacttgcattctgggcctagctccaccactggctgctttgcaactttggggttgacagctatggagtcaaggttgagaatgtggcctttgaagctaggtctctagggtttgaatcccagctccaccgtttattaattgtgcaacattggaccctttgtgctttgttttctcacctgtaaaatggaactgataataaaagttctgtcctagctacacatgaggctggggcaggaggattgcttgagcccaggagttttaaggctgcagtgagggacaatagagtaagacaccatctctaaaaaataatttaggccaggcatagtggctcacaccgtaatcctagcactttaggaggccgaggtggtggatcatctgagcttgggagttcaagaccagcctggccaacatggcgaaaaccctacagagtctactaaaaatacaaaaattagctgggcgtgctggtgtgcacctgtaatctcagctactcaggaggctgaggcaaaagaattgcttgagctcaggaggcagaggctgcagtgagccgagatggtgccactgcactccagcctgggtgacaaaaaaaaaaaaaaaaaaaagaaaaatgcccatgtgtcaccccagatcaattactaatcaaaatatccaagactttgggcatttgcagttttgaaagcccccttcctccaagcaatgttgatgcccagtgagggttgagatcactagatgaatggtctggagggctccatccagcctggcatagcacctccctgtcacataccactcaggacccctctgcatagccctggaggtgctgcactttggaagagagctcattaccaccagtgtggctggaagcaggttcctctccactcacttagagggagttctcctctataaaatgagaataatgaccttgccatgctcacctcccagggctgcccagacataatgttttactagtgataggacctgctttataggtaggcaattatattgttccttcccttgaaaaacttttatcgaggtctagtgcacacccatctcctttacacatggtgactatggagttaataatctcctggagggacctgtcctgaaccatcagacaagttaggtcatagggccaacccccttttttagctcctgctggttatgaaatgagccaaggaatggaaagagcctagaacaggtcctgacacatggtgagtgctctctaaacagtagctctccttactattgttattgtgaccgtgccccaggctaggttggagggaggcctggttgcagtgcacacagggagctcagatgaagggaggcagtgaaggtggggcctgcaggaggaaggggagtttagaatgaggtgctgaggagtaaggtgtgtgggaagagtagaggaaggagtagagcacatcgaggttgctggttggtgagggggctatgatgaggatactctactcaaacatgtattgagaaccttttgtgcaccaggcactgtgccaggtgctggcagagcaccagatccacccagtctctacccttgaggagtccctctaatgggggaagacacacatacacagacaatgtcacagacagtgtgacaagggatactggtggcgagtggggacatttaatccagacttagtggcacttttagctgagcctggatgatgagtaggagttgatcagagggtaaagtaaatgccatgtctggaaaaattagtcagaaagcaatgagagaggttgagattgctggaatttagataaggctagagatgcaagcagagcctaggtctcggagggcattacaagtcaggtcaaggaatttggacttatcctaaatacaatgtggagccactgttagtttaaagtcttctggaaacaaaatgaggctttcattttgaaaagatcgctgtgggctgggcgtggcacctcacgcctataatcccaacacttttaggaggtcaaggtggaaggatctctttgagccccgcagttcgagaatagcctgggcaacaaagtgagaccccagctctacaaataaaaataaaaataattagttggttgtggttgcatgaacctggtcccagctactcaggaggctgaggcaggaggatcacttgagcccatgaattttggattgcagtgagctatgattgcaccaatgcactccagcctgctggatgacaaagcaagatcctgtctcaaaaggagagagggaaggaaggaagggagggagggaatcactgtgggaaggagaaacaatgggagcagaggcaagggtggaggcagagagactggttgggaggctgctgcagttacccaggaaggaaggacggaaggaaggaagggagggagggagggagggagggagggagggagcgagggaatcactatggtttatagaggagaaaggatgggagcagaggcaagggtggaggcagagagactggttgtgaggccgctgcagttatccaggtgggggttggtggtgagcagaccagagagctggaggtagaacatagaacagataacaattctggaggtaggaaccacaaggacttgggggctcattggccaagggagatgaaggaggagaggctgaggaaggaggagcagagtgaagctgtgtgttgggagacatgaactccatctgagatatccaaggagtgatgatgagttatggatgcttaggaatcactcctggtctgggaatacttggggtcgtcttctaagaattctcaagagtggaaggccactcacccttggcccagtgccaggccctcgccttccctagtctctctgggacaggctgggaattcctggctcagaaataccctgttggggcaggccggccttgatgctccccagcccaaagggaggaatgtgcctgtgcacctgctccgtgatacacgggggcgggacagtggagtggaggtgagtgaattcaggggtgttcctcacttcccccatcctggacttctaggctcagttgtggccccaggaatggattctgagtaagaggccagaaagcaagttctctgggcctggggtacagagggcagcaaggtacagttgacataccgcagacacccaggcagggcaagggcacccaggtttcagtcctggttctgtcacctctggttaggagctgtgagcacccaagggctcattcttgtcctaaaactgggtcttcaagatggtttggtttaggtggtgtgaatgaacccttccatctccaccctcgagagagctgaattttcccccacccgaggcgttccacagtgggcagaacgccgcagcccagtctgccctggcccacccagtgctcatctccatttccagcccctcctgggcgcctctggcctcctgcagccggctctttgcgctccttcattaagctttggtttctgtgggaatgtgacttgaattaactcttgggagaaaaatcacagaaatcaggaaaggggggccatggggagggggcagtgagtcacgtttccatgtgtatttttcaaactttccgatgggagtttggaaaacaacagtcttttggttgccagcttgggcccagctctccaagggtcccatatgctgtgtctataggtcttcccgtaactgctgcgtcccggcccacccttcgggtctgccttatttcctgggatcccttcccacttctccctggggacttgtgctgttgcagaggcactgagaagtccatcccgtggtgcagcttccgtctctcccctggtttcatttcacagccaagccctcatctatccttgcctcaaggtggacccatgggggctgcagctgagctggggactttgtccctgcagctgctctggccaaccctccaaccctggagaacctccataggcaccaggaagtcctgggctctaggaacctccttcctgcccccacagcttcctctttgtgtcctgcctaccagtccttcccgcccatctctgcatcccagtttccagagggcctgtggctgagggtgagaagccagcgatcgacccccagggagaagtcttgcagaggagggtcctcatcctaatgaggccgccaaggaagagggcccccagtatgcccctcttgtgtgctgggccctcgcacttcctctgtctgggactcctctaacagctgtggggagggtgccaggatccccattttgcatacagtagctgaggctcagccaggaaaatgggtgggaaccttaaggatggtgggcagatggtggcccccttgaggaggagatgggagggcagcgcatacccctagccaacccctccttgcaagccctcattcgggcggggagaaggaaggggtcctggactagctctcctgtgtcccctctccgggggctgccccctcccagtttctgactaatcctttccatcggcagtggcatgtcctgcccctgctgtgcctgtgccaacaacagcccacatcacagggccacatctggctccatttgaacataccccaccctccctgctctttatccctcaacgccctcccctgcccaaggaccagagtagggagtggccctctggacccccttctctggctccaccagccctgctcccctgccctttcgaagcctctagtggagtcactcctttccttccccgaacccggcctcagttcctgggacatcctggctccattcttcagcacaccctccctcatcatatccacactccttggctccccccttcacagcccccactgaaggagggattgggaaggggacattttgcaaggtctgagccccaagagatgtcccagagtagagggaaggcctggcagcccagggattttcccttagcccagctctctggcatattgccagcttgggcgtgttgggcggcaggggtcggggtgatcccaagaggtgcgtgtatggaggggtatagctcagcctcccagctcgggtggggagcggtggctcaggcctgtgtaggctggcttttgttggggaggagcctggaagggcctgcagctactggcctccctcctccttcctccttgcttagcaactgttgtcgtctggtaaatatttgccccaacaggatctggggctggagcactggcgtcagccgaggtagttgccccctcctcaatttatgagtctcccctctgttcagttccctattccagagccccctggactggattctaaatgtggtcctcaccccctccctcatggttgatttcctccccaacctcttccctgtctcccttttactctccttcatccccactcatcctctgtgcccaggtctctctcgtccatcctccactcctggatccattcaccaaggggcctgagtgaggtcccaccccctaagccacacaggtcctctgcttctcccccgctacatctcactgggaccccagcctggcaacggctagtgcgtcgtcggtgctcagttagccccaacatctctttcctttcctccaacaggaaacacaccttccacctctaaaccttagctccaccaagctccaaggggagagaagagagggcatatgggaatgttttgctggaccccatactgcactcccaggccaggaagctctgcatcaggaagccagcaccattttcacctcctctggggtaggactgaggggaccatggccaagaggaaacagatgcccccttagctcctccctgggtagcctgagcgggccagggcctgagagcatgccagttttagcctgtcttcctgtccttcccagccagacccctctcatcctcctcccccagtggttttctcattacctgtcactgacggagagcccctcagaggtcaaggccaaagtgaggtgggctcttggcatgctgtgcaagcttggagctcacccggcaaagagggccaatggggtgctcctctggggcgggcctgtgggctggcttagggatagcagacaggggaatctggggagttggactaatgtggatctagaagggaggtggttgggctgcacgatgccttaagactcctcccagctctgaagttctacttctaggcaatgaatgatgaaacgctggcccaagtgcagtcccttccccatcccacagggcggagaccccagccatccctactctacttggcagcccccctccccactcctcctgagagtgccccttgctccaccccagcggccaggaaatctcctgcagattcaccaccaccctcctggctgggagttcactttcctagttgacctcctggcctgagggccagaggagagctttcaacggggaccttgaggagtgtgagggctgcaggggctgtggactggagtggattcaccagggagcaaaggaaagtgaagtttcagggcctctcagttgcacgggccctttcaagacccgaagaggagccctgccaaactttccacatgatcccatgtccataacatttgcaaaaagatcattttgtatttcttaaagagggcctccccacaaaattgtgtgcactttaggtaggatgaacaactgtccctattttagcattaaaagtcccttatctggccaggcacggtggctcacgcctgtaatcccagcactttgggaggccgaggcaggcggatcacgaggccaggagaccgagaccatcctggctaacacggtgaaaccccgtctctacttaaaaaaaaacagaaaacaaaaaacaaaaaaatagcggggcgtggtggctggctcctgtagtcccaggtactagggaggctgaggccggagaatggcgtgaacccgggaggcggggcttgcagtgagccgagatcgcgccactacactccagcctgggagacacagcgagactccgtctcaaaaaaaaaaaaaaattcccttatcctaggagactcctcagtccccggcaaacccagggcaattgcccaccctagtttcaggctccacaaacatttggcccacactgggttgagggtgagggagaaagggaatccttttctgcctcacttcctggaaatgtgtaggggcgtgagctatggggcgagggggccctctcctccagctccagtcctggagttgtggcgcttctgtttgtttccttggcaacagggaaaggaaacccccatttaggaggccggggaggccccagcaaccacacacacacagagacacacagactcacacgcggccgcccacacgcagtcgcctgcgtcagcaccagccgtcaggccctcgctgcccgcctgcggggtgtggagtggggagaacagccccgcctgaatccagtccgactacccgcccctactgatttgcctgggacgccgccggcccacatggccccacccacgcctctgtccccacccccccacgcctctgtccccacccccccaccgcccccggcagcgttccccccttaacaccttcccccaggtggtgaggggccaaagctcggggatggacaagagaaaggaaggagatgtcactgctgaatttctgctgaatttccttctgcctgctgcccgatttctatttgactggcaatagtctggtgtgtattgtgacagttcagggagcctgagactcacaagtgaggtggcgatttgggcctggttgggtgggggaggtggtttggaatgccgggaatggagctcctggggagactgtaggattttgctgttggattgggttccttgggatctgggtcgaagagggaaagagtatatttaacctggaggcagaaacctggggtttgggcctgcttctgtcacttgtcagctgtgtggcctggagacaatcagttagcctgcctaagcctctgtctcctcagctgtaatatgcagataatggtgcttgcctgtgcacctcaaagaaatttgagaaggctaaggtagtaaccttgattgtgaaaagcttgtcaccggggggactggggcaggtgggagggcttggttactacttatccagtcgcccctccagccccgctggctcagtgagcccagcagccacttcccgactttgtaggaacccatgccagtccctaagtggacctgctctttgacatctgtccagtgtggctgccctgtctcccatggcagcgtggcactgagctgcagtgctgtcttggaggttttgaccctgcctggctgtgtgactttgggcaaatctttcctcctctggcctcagaattccacttataaagaaaggggcttattcctcagagcccaggggcctcctggaagtgggctggggggatcaaccaggcaggggcctcaagctccctaagtagagaagctctgcctctgtcatttagtagattgtgctttttgggtgagatttcatttgagtgagggggatctctgactttacaaatagctgtcattcacttgctccatctaagggcccgcttctcacccggcaccacctatgagcctgcctcattcccccttgctgagcctgagaagaaatctactcagctgtgctacctcaggtcaattacaacctcgtggagtttgggttgttgttttttttttcttttttttctttttttttgagatggagtctcactctgtcacccaggctggagtgcagtgacatgatctcctgcctcagctccctgagtagctgggattacaggtgcatgccaccacgcccagctgattttttgtatttttggtagagatggagttttaccatgttggccaggctggtcttgaactcctgacctcaagtaatccacccacctcagcctcccaaaatgctgagattacaggtgtgagccactgctcccagccggaatttgggttcttgacacataaaatgcagataataatacctacctcataagattgaggtgaagattaaatgggatcacctccatatagcccctagcctggttgctggcacatggcagccccttaaagagtaggcacggtcttccactgtcaaggttataactatcacctgcacatgagtgactcagcacttcaatcattgtttaataccctgtagtcaaaggatgaataagaccctccctcaagaactcactataaagagattcccaaaccatgtcccagaatctgtacatcacctccacctcctcagaccctcctccaaagagtcgcctgtctctgactcctacctgtccagggttctagccacctgatggtaagatcttggctttccaattcaggcaaactcgtattaaaatttcagttctggctgggcgtggtggctcatgcctgtaatcccagcactttcggaggctgaggtgaccagatcacctgaggtcaggagttacatggtgaaatcccgtctctactaaaaatacaaaaaaattagctgggctaattttttagtggcgcatggttgtagtcccagctactcgggaggctgaggcaggagaatcgcttgaattcaggaggtgcaggttgcagtgagctgagatcgtgccattgcactccagcccaggcaacgggcgaaactccatctcaaaaaaaaaaaaatccagttctgttactaaccatatgaccttagacaagtgattctcaataaggggtaattttatcccccaggggatgttaggcaatgcctgaagatatttttgattgtcataactgggaatggaagtgctactggcctaaagtcgggagaggctagggatgttacaaaccatctcagagtacaaagaaccttctctgacaacagagaattatctggcccaaaattcagtagtgccaaggttgagaaacctgaccttaaatgaataatttaacctttctgggcttcagtttcctcatctgtaaaatagggctattaatagtatctaccttgtagagctattgtattggtccaacaaaataatgcaagtacctagtgcctaataataaaggtagtccataaatattccctacacgaatggttcttagcatgcctctggaatccctcctggcttcatcactgggctgaacccaccggaccctagtttggcttatttcttgccaaggccagtgctcctgactctttcttcactggtcttgatgctttccttctctccttgacctcaaggcctatcaagcagctggaagcctctccctcaggccccatcccagcaccaggcccctgcctccacctcccacttctcccttcccgtctctcttccccctctttccagccttacctctagtggctccccatgccccttggcaggtcagagcacactcagctttttcccacttcagcacctctgcacagacttcctccagccagagtggcagaagacagagaagcatgtccaggatttggaccagactgcctggtcccagttctgcactgggcctgttacttacggcctagttttaggaaagtcagcctcatctgcaaagcagggaaataatttccaacccatgaggttgttgtatggacccagttgagaatgtatgaaaacatgcaacaactataaagattgttaaaatgtaagttattcactgtgtgagcattattctgctaaatgtatgcatgtatgtatgtgtgtgtgtgtgtgtgtgcatatatatatatatatacacacacacatatatatgtaattttttttttgagacagggtttctctcttgctcaggctggagtgcagtagtgcaatcacagctcactgcagccttgacctcccaagctcaggtgatcctcccatcttagcctcctgggtagctgggactagaggcatgtgccaccacccccagctaattttttttttaagagatggggtttcactatgttggccaggttggtcttgaactcctgggctcaagcaatctgcaatctgcctgtctcggactccccaagtattgggattatgggtgtgagccaccatgctcagcctctgctttatatttttatttccatagctcctaccgtgttctaacaaactataactttgtctttggtttattgactgtctccctccactagaatgtcagctccataagggtagggatttttgtctgttttattcacttctgcatccctggtgtctagaatagttcctggtatatagtagatgttcaataaatatttgttgaatgaatgaattctctgtgtataaggcagttctgtaaagcccctaaatcttccttctccaagaagccctccttcaaatgtatgtaaccttatttagttattgcacatccccattttacagatgatgaaactaacgctggaaaaacttgtccagagtcactgacctgaaaagtggcagggccagatgcatttgtttatccaagaaaccctgagagggctgggcatggtggctggcacccgtgatcccagcactttgggaggctgaggtgggaggatcacttgactccaggagttcaagaccaacttggcaacatagtgagacccccatctcttaaaaaaataaagaggctgggtgcggtggctcatgcctgtaatcccagcactttgagaggccaaggcaggcagatcatctgaggtcaggagttcgagaccagcctggccaacatggggaaaccctgtgtctactaaaaatataaaaattagccgggtgtggtggtgggtgcctataatcccagcaacccttgaggctgaggcaggcaaatcgcttgaacatggaaggcagaggttgcagtgagccgagattgtgccactgcactccagcctgggcaacagagcgagactccaactcaaaaaaaattagaaacaccgagtgcctgctgtgtgccaggtgttagggagacagatgaccaagacttggtcctttctgtccctcacagcactttcaggaatgggggtcacagaggaaacactaggatgctataagaacacagaggagcccccccacccaatcaaggtcattggtcttcaagataaagtgcctaggcctggtgcagtggctcatgcctgtaatctcacactttgggaggctaaggtgagggggcacttgaggtcaggagttcgagaccagcctggccaacatggtgaaacctcatctctactcaaaatacaaaaattagccgggcgtggtggcacacgcctgtaatcccagctactcaggaggctaaggcaggagaagcgcttgaacctgggaggcagaggttgcagtgagctgagattgtactgttgcacttcagcctgggtgacaagagcaaaactctgtctcaaaaaaaaaaaaaaaaaattctcaaaccgtccgttggacccaaccactgcatgctgatttcactcatgcatgctccagctcccagacttctgggatccctttggaattcatccaattcagagtcctctactgctctttaatcatttgtgcttgttggttttgcttctccctctgtctttcccactggtgggaggctcccttgggagcaagcatagtattgctatcaccctgtggcatagtgtgcagaactcttgcacacccaggagctcagtccccgtctttgatagccactctacccatactacaggtaagaaaactgaggtccagagaattcagtagcagatctagcatcactcagcagttaagaggtaggattagaatgtggtcaccctctagccaccactcccatcacctctcacctccagcaggctcagctcctctggacctggctgctgcttctgggttggtgatttttgccctggcaaagggagagcagacttatgacatctggagtccagagttaggattgaatattcaggataaagtttcactttgaagttcagatttaggattgaggccattttgatggtggtcgcagggaacctttagaaagagcttggagtgaaatttggggtgaaagccctccttctttctcctgcaccttttccacaagatggggaggtctggccagacacagtggctcacacctataatcccagcgctttggaaggctgaagtgaggatcatttggggccaggagttttagaccaaattgggcaacatagcaaggctccgtctctatcatgatagcctatagtctcagctactcaggaggctgagataaaagaatcacttgaacccaggaattcaaggttgcagtgagctatgatcctgccaccgcactccagcctgggcgacagaccaagattctcaaaaaaagagcggggaggtctaggacaggaagggttaagtgtggtttagctttcccagcctggaaaggaagccaggccaagcagctgggtaggggaaaagggggcactgagtgccagggaggggctgaggcagtgggaacagcatgaacccttccctcacgtttcactggcttacccctcctgcctctgcttctggtgtggagaagaacaagactttttattgtctgggaagctgagggtgggtgccacgccctgggggagagaagccatattctgggccccctcatccgggtgcatccctagtgctcaccatgctgcccaggcaccctcactgagatgagaactttccttgttcccctcccctaataaccaaagttcctgccttaatcccactccagtccctcatccaccccgaggccaggcttcagaacccagaactgagggcctgtccagccctgctttccttgtgtttgagggaagccctgatatcttggagctgtacaaggtagcaacataatttgatttccctggttgctcatcggaggataagctgtgggaggcagttgggcagggcatgcaggcagatgggacccaggcctcaatgctgtcacctcttagagaggataaggtgggacgggcatggtggctcacatctgtaatcccagaactttgggaagctgaggcaggcagattacctgaggtcgggagtttgagaccagtttggccaacatggtgaaaccccatctctactaaaaataaaaataaaaaaaaaattagctgggcttggtggcaggtgcctataatcccagctactcaggaggctgaggcaggagaatctcttgaacccgggaggtggagattgcaatgagctgagatcatgccactgcactccagcctgggtgagagagcaagacttaatctcaaaaaaacaaacaaacaaacaaaaaaaacaaacaaacagaggatgaggtggatggtgggaccaggataggggccaggatgaggggaggggagtggaaggcttatcaaaagggtccttggtgaggcctgaggatggaggctccagagcctgaggtagcgaaccctggggacctgagtgatctcgttttgtgagagagcctggcccctccccagagccagctgcagaatggacctggccagagaggaaagtagagatgagtatggtgctggcctttgcagccagcaaggctgtggggtctttgctgttcctgtcccccactaccttcttgccccccactaccttctttctggctgaaaccaggatagagacccaatattggctgtccagcccccagccctgcttcccctttcaggcccctctgggaaccacagaaatctgggacctagtgtcttggcaacgtaatgaatgcatgcacagctctggtatctgttttaaattatccattaaaataagtacagttctgggggaaaaaaataagttgactgggtgcggtaagcagtagaaagggactgaagggggaaggaacccaggcagtgcttgggtccaaaggaaggggacaggagatggaaggggcagtgcctggctcctattcttggctttctttaggggacttctttaggggactgtggcttgttgcttgggtctaaaaacgaatgcttggctttgaagagagatagattggggcaaaagaaagaaaaaaagggaccccccaaactccttgatccctggccccaaactgggggcataaaggaactcaggttccagaactttgctccccccagggaacccaggcattccttctccaccccactcctggcacactgagatgcagctctgaatgggctgcccacgtgtggaggggggttggggtgactcactattactactgggaggacagggggagccagtggtggaagaagggtgagtcacactgatgggcaccagcctcagccctccccccactttcctggctcccagccctgcctacctgaccctctcccttgctttgcgcccacttccctctctttctccccgacccttttgcccacccactctccctccttggctctgccctctagcccagaaggtctgaggcaatgggggcaagcttggagccgacagtgctgagcaggcaggagccaagagaggggaagcttgagcctcacgcagttaggggtgcgctggagagggtggggcccgactccgccacaccccaacggtccttccccctcctcaccactcccgcccccacccccaatggatctgggactgcccctttaagagtagtggcccctcctcccttcagaggaggacctattagagcctttgccccggcgtcggtgactcagtgttcgcgggagcgccgcacctacaccagccaacccagatcccgaggtccgacagcgcccggcccagatccccacgcctgccaggagcaagccgagagccagccggccggcgcactccgactccgagcagtctctgtccttcgacccgagccccgcgccctttccgggacccctgccccgcgggcagcgctgccaacctgccggccatggagaccccgtcccagcggcgcgccacccgcagcggggcgcaggccagctccactccgctgtcgcccacccgcatcacccggctgcaggagaaggaggacctgcaggagctcaatgatcgcttggcggtctacatcgaccgtgtgcgctcgctggaaacggagaacgcagggctgcgccttcgcatcaccgagtctgaagaggtggtcagccgcgaggtgtccggcatcaaggccgcctacgaggccgagctcggggatgcccgcaagacccttgactcagtagccaaggagcgcgcccgcctgcagctggagctgagcaaagtgcgtgaggagtttaaggagctgaaagcgcggtgagttcgcccaggtggctgcgtgcctggcggggagtggagagggcggcgggccggcgcccctggccggccgcaggaagggagtgagagggcctggaggccgataactttgccatagtctcctccctccccggaactgcccccagcgggtgactggcagtgtcaaggggaattgtcaagacaggacagagagggaagtggtggtctctgggagagggtcggggaggatataaggaatggtgggggtatcagggacaagttggggctggggccggcctgaattcggtcagattgggatttgccaactatttggagccggggggaggggcttgagcaaaacagaactagccctgccagctcgaagaactctgggcacccaggacacatcggagtggcagaaagggtcctgttagaactttgttagcgggcttggcactgtgctagctttgcccaagctggctctgaacacatgatgcccactaagacataactctcaagttggcatctgtccagcgtgttggagcgaggtcaggaaggcagggcaatcccccttttccctcccaagggcttggcggtggccccccctcagcatgaccttgtcctgggttctaagggttgggaagttctccctcactctgccactctgcgtgtctgggaccttccttgggctctgacaggcccaccaaaagagctccgggagatgagagatcggctcccccgcagctcccacagcccttggcctgcttggcccaggaatgcaagggagggagggaggcagagggcagaggctcccagctcaggaagttgtgttatgcccaggtctggccgcactcctcccttggccctctgcctagtgtcttcgagggttgggggcactgtccttccctccttggggtgagccactttcattttcccagcggggccaggcagtctttgctcgggcccatcctcttagctgctgacgttttgatctttgtcttattgaagtgctggaatacagtgacatttttgaaatccagccgttggaagattcaggccactcccactttacccacccctgccccaccctaccccaccctactcaactgcaccttcttcttttctaaaaaagcctttgggagcttggaagtataggccctctcttccagccccatcaaaatttgtttcccttcttcctgccttccctttctctatgcagacccaggccaagagcactaagggtgcttggagatccgtaaagggctgttggctttgacttcttctctctcttttatcatctactccaaacttctgctcttcctagaaccctttgctaggtgtggttttgttgcccaggctggagtgcaatggcacaatctcggctcactgcaacctccgcctcccaggttcaagtgattctcctgcctcagcctcccgaatagctgagattacaggcatgtgccaccatgccgggctaattttgtatttctagtagagatggggtttctccatgttcgtcaggctagtcttgaactcccaacctcaggtgatccacccgcctcagcctcccaaagtgctaggattacaggcatgagccaccacgctgggcccatcacccttctttctgaagagtcaatggaagttgtgtgtaggaagacaggcttaacggtttttttttgagacagggtcttactctgtcacccagactggagtgaagtggtgcgatcttggctcaccacaacctctgcctcccaggctcaaaagattctcctgcctcagcctcctgagtagctgggattataagtgtgtgccaccacacatggctatttttttttttttttttttttttaatttttagtagagatggggtttcaccatgttggctaggctggtctcaaactcctgacttcaaatgatccacctgcctcggcctcccaaagtgctgggattacaggtgtgagctaccatgcccggccatcaacctttattttgtttttttgagacggagtcttgctttgttgcccaggctggagtacagtagtgtgacctcaggtcactgcaacctctgcctcccaggttcaagccatgctcctgcctcagcctcccaagtagctgggactataggtgcctgccaccacgcccggctactttttatatttttagtagagacggggtttcaccatgttggccagggtgatctcgaactcctgacctcaagtgatctgcctgcctcagcctcccaaagtgttgggattagagacgggagccactgcgcctggcttctttttttcttgagatagggtttcactctgttacccaggctggagtgcagtggcaaggtcatggctcactgcagcctctacctctctggctcaagccatcctcccgcctcagcctcctgagtagctgggaccacaggcaggcaccaccacccacagctaatgtttttgtattattttgtagagatggggttttgccatgttgcccacagtcttgaactcctgggttcattctgctgaaagagaccacacctgtccttttctttatttttattatatttttcagagacagggccttgccctgttgctcaggctagagtgcaatggtacaatcataacttgctgcagcctggaactcctcctgggctcaagcgatcctaccgtctcaccttccggaatagctgagactaagggcaggcaccaccacgcttggctaatttttttttttttttttttttttttgctttttgtttgtaaagatggaaacttgctatgttgctcagctggttccgaagttttggcctcaagcaatcctcctgcctcggcctccggaagcactgggattacaggcataagccaccaggcctgacgccaggcctgtcttttttctactagtgatatgaacaatttagttagcaagacagataggaagcaaggaaggggagacccagagaattcgttgcattctaaactagtccactcatctaccaaagccctgtgaaggacatttttagcagttttagcagttttctggtcaaaactttgatcgagaaacagattgagtggattcgatattctcttgctcacccagccacgccagtttgtctcctctgcctcctagtgcagctgtccaggcctgggacaccaggcgggtatgtgcgcatgtggggcagggcggaggtggtgtgtgtacttgttatatttagccacctccctctgttctcccccactgatcctggctggaaaggctgggcttccggaaaagagaggtggatttgcacacctggatcccaagctgatagaaagtggggtgaagacaaaggggactcagactggggtgtctgtcctcttctatgcccacagtaggaggagccaggattggttactccctgctgggtctgctgtgctcagagtgaggtagagaagtgggtagagtaaagaatttgggagaggaaaaaaggcattttcccaacccctcccaccaaagcctagagagaaggtgttgtctggtttaatgtttaattagagctcagagttcagggccagatttggagttgggatggaaagttgtttttaagaccctgtagcaatttttgacccagcctgggtacctcaaccacactcaggagtttgggggaccttctgttgggctggattataggctccaagaagaaacccctttcgccaatactctctctctcttctttttttgagacagggtcttgttctgttgcccaggctggggtgcagtggcatgatcacagctcactgcaacgtcagcctcacaggctctggtgattctcccacctcagcctcctgagtagctgggattacaagtgtgtgccaccatgcccagctaattttttttttctttttttttttttgagacggagtcttgttctgttgccaggctggagtgcagtggtgcgatctcggctcattgcaacctccacctcccaggttcaagcgattctcctgcctcagcctcccgagtagctgggactacaggcacatgccatcacgcccagttaatttttgtatttttagtagagttggggtttcaccatgttggccaggatggtcttgatctcttgacctcgtgatccgtccaccttggcctcccaaagtgctgggattacaggtgtgagccaccgtacccggccactaatttttatatattttgtagagatggggtttcaccgtgttgcccaagctggtctcgaactcctaggctcaagtaatccacctgccttggccttggcctcccaaagtgctgggatgtataggcatgagctaccgcacctggtaccccctgccccttctctgtctctttctagtctgtagcccaagggatttggatacccaagtgcaggcagaatgggaaggttgtaagcaccagggaagcctgtctggagtccaggcttgcagctgggccccaccccaggcaaggcagctgggtggatgactcagatgctgcccccctccctcccaccctggtggctttacagaagacagcaggagacagggtggagacagcagttgtcttaaagggaggagtggtggtctgaatgtctacctcttctgcccccctccccattgcatcctggagtcccttgcctggctccttcctgagaccctctggtggtgtctggacacatagctctctctggacaggtaacatgcacaagtaattagaatccagagttgagttcagagttatggattgggctgcaggatagtgccagggtctgtgccttcccatgtgaaactgatggaggaaggctgagtcagaagtggggagatccgaggcccacaaagcagaagcgctacttccactccaaaaaggccctggtgcttgacaacttcctggattgcccactgttgcagccccagtgtggacaggcagggagatgcaggctccagttcatgtaggctctgatcaagacaagaacagcaaaggccacagaggcacagatgcttgtcccatgtcacacaataaaggggtcagcacttgatcacaggccttatgacttccagctgggtgtgctcttaccattaagcctcacttctctagcttgggggacaggttggagggaggatctagagggtgaggtaaggtgaagtcaggtagctgaggctcacttctgcagcctggaaactctgctctggggccagtgacaccttagtgctctatggccatacttcgtggctcatgcctgtaatcccagtgctttgggaggctaaggcaggaggatcacttgaggccaggagtttgagaccagtctgggcaacatagcaagacccccttctgtacaaaaaaattagccggtcaacacctgtagtccagctgcttgggaagctgaggcgggaggatcacctgaagccaggagtttgaggctattgtgagctatgactgcactactgcactctagcctgggagagagaaagaccctgtctctgaaaaagaaaaaaacaaaacaaaactctgctgtcctgcagggcctgttagcatatgatcgatagcctttgctccagcctatacctggacccaggacccctgccagcccctcaatcgtgagacggtcagagctctgggaggctggtgattcttgtcttgagactatcttgagacttgtcatgggaattgtccacccggattgaaaggaagctgtgccttttggcagacccattaggttaatggggttggagacctttgaggatgcatgggccctgggctttatctgagggtatctcctggtgttacctctccaaccctccaccaccaaatccattctttttttttttttttttttttttttgacagtctcgctccctggcccaggctggagtgcagtggcatgatcttggcttactgcaatctccacctcccaggctcaagtgatcctcccacctcagcctcccaagaagctgggactataggcacgtgccacatgctcggctaatttttctatttttagtagagaccaggtttcaccatgttactcaggctggtcttgaactctggggcttaagcagtccacccaccttgacctcccaaagtgctgagagccactgagcctagcccaaatccacgttctgattcaaagggaaagaagaagggtgcagctaaacctggggggtgagaagtacttaaaaagcccaagagaaacaaaagagagaataattcctcactaggaccccctattgccttcccactattggtgcccttgcttggcacttcccctggcctccaggagtctgagacttactcttccatggatgtgcccattgcccccacttccaggtccaccccccagtgattcggtagcttagtgtctgcgctgaagcccaggacagctggatggacaactggtagatcccttcacctaccaactgtgctttctgctcccctcccccttgcttccctcctccccagcccctcgccacccctagcagctgcagcagccaagaccaagtcttcagagacccagacacaagggcagggttcattccattctcacctccttggggtcccagtgtactgataggccgaactctaatattataggagatctctggaagattgcagggtctcttatccctcaataaggggcaaggcaagccgggcgcagtggctcacgcctgtaatcccagcactttgagaagccgaggggaacagatcacttcaggtcaggagttaagagaccagcctggccaacatggtgaaaccctgtctctactaaaaatacaaaaattaaccagaaatcgcttgaacccaggaggcagatgttgcagtgagccgagatcacgccactgcactccagccagggcgacagagcaagattccgtctcaaaaaaataatactaataataaataaataaataaggggcaaggtagtccaccaacaaaatgacaggcagtgtgatatagtggacaccctagccctcggtgcccttagttctgtgtgtggccctttcactaaattgctgtgtgaccttgagcaaatcgcctcccctttctggctttccttagctgtaaaagaaagggattggagcggaaagtctccagagaccttttaggttccaaagtagtacagtgacccacaaagtgagaaaacagtcttctaaaataccaagttattaatagtaaaatcaaatataaataatgtgaatatagttaatagctaatgttgttctcaatagaaatgtttcccacaagctgtggaattaaacatactaccacatttctctatttccccgtgaaagtttgttagaaatggttaaattgtgacattaccctcttggcaaatgttttgttttcattgctactaggaaagggcaactcgttttcgatgcctctcccttctggacggtggaaagggctgtgtcatagagtaggaacgggagatgcggcacaggaatggctcccattgacccgggttgggggctagggcgaaggcctaggagaggcagaactgttaccttagagctggccaggattagagaacagtgcctggaaccggggggaggggcacggtgaccttgggctgcccaccttctacccttccagcacccatactggctcccccaacctgcggctgggctgggaggaggtcttggcccctaccaatcccttaaggaaggggaaagagtttgggaaggggagtcctcccttcacccctgcctcccccaagttgtgagagaggaagccggaatcctgcctgctgaagccaggaataattctggctgagatcccaggcccggcaggggcgctgagtcatggtagagggcagagtggagagtggacaggagaccctaagcttgtccagtcagaaaagcagaggctgaggggtggccttttcttgagaactacattcaagttgcagcaagaaggacagtggtctgaatttgacggggacaaatggaagggagataggacacatgagttcctttaggtctggctcaggggagctagacttcatttcaaggggtctaggttctgggcagttgagaaggaggctatttggggtcaccaaggctcccctttcttcccaaagctctaacactgccaccttctgctggctaggagagagctgtgtcttctgaggctagagctggaatgcagtgagaccagactgcctaggtcctccctcacttcttctcctgaccttggggtgtggctcccactctctcccagtgtcctcagggttaataactatgtgccaccagatagagagttaaggggctgctgaattggcttcttgtgaagggaatcccctaaatgtccctcgttttggtcactggcctccctcccgcccccttcaggacattctactatcttcttaggccatccctccctcctccaggcactacttcttttgctctatccccaagccccacccctgcatttttgtgacaacaccggaatgatttctagagagagaggccaggaagaaggaaagtggcacttggcaggagaccttgcagggggcggctggtgaggaagccagccgcccattgtccaggaccccagtgccctggcctccggcctcaggcttctcctgcctctgtacaatgccacgttgatacgcccagcagctgtgactcaggcctggccccctgccaggcccagcacttctactggagttgcgtctgaacatgtcaacaggcttcctatccctctctcagcaccagttctccccacttcagcccctccctctgcctggaattaaaacctggctttgtcttagggaaggacagctgggagcctagtggctctggtaggggatctgagaggcctcagaccctaggcatatttggctgtttggcaggtgtcacgcccaagggaagcgtgtggaagcagagccatgcctgctgtgggtgcacatgcccgcgtgagggagtcggggtgtttcatcctggggcacctgtgggcttttgaggtgtatgatattcagaacttcacaggttggggtttggggaaggctcaaggggcttctaagtccctggaacagctgcccccctcagttcctctctctctctctctttttttttgagatggagtctcgctctgttgcccaggctagaatgcagtggcgcgatcttggctcactgcaaactccgcctcctgggttcaagtgattctcctgcctcagcctcccaagtagctgggactataggtgcccgccaccatgcctggctaatttttgtatttttagtagaaatggggtttcaccatgctggccaggatggtctcaaactcctgacctcgtgatccacccaccttggcctcccaaagtgctgggattacaggcgtgagccactgcgcccagcctcagttcctctctttaaggtctcctttccagagagggatagcacctcaaatgccagggaggggaattctccacatcctgcccttacccgagttgtggcagacccacagactagccaagaaaccaagcagtggttactttgccgggttgggggggaggtaggggctatcaaacctcatgattggccgcacacaaaggtgtgagtatgtgtatatttgagggtgggtgggagtggcactttcactaggcctccgtatcactctctgactggggtatctcccagcaagcgagacagaggcagacacgcttcccagactgtcttactgggtctctctgtgttattctctgcagtgtctgtgtgtatcgtgccattttctatgttttgcaccaatctgctgtgagtgtcctcaggtgacctgggggcaggtttttagtgcctgagcctacccgtctccaggctttagtttccccctgtaaaagtataggagttggttcaagagaaggttcctctagaagccttgagcctgtgaaccgtctagtctccgggtatttgtgggacacacagaaaaagccccacgacccaacaggtagaacactggctgaaatcagcagggcagagctgagacaggctcaagtaggctgaggggtagggaggttttgggtgaatgggagggagggacagagagaaggaggatatattgcagtaggaggagttgctggaacaaaaggaggggtggtaggagtggcttggggtggcagcagaagacgccctgtcacatggcgggaagtcagcctgggcagaggtctaggtgtccaggaggggctgggtgtggtggctcacgcctgtaatcccaggactttgggaggctgatgcaggaggatcacgtgaggtcaggagttcaagaccagcctggccaacatggcgaaaccctatctctactaaaaatgccaaaaattagctgggtgtggtggcaggcgcctgtaatcccagctactctggaggctgaggcacaagaattgcttgaacctgggaggtggaggttgcagggagccgagatcgcgccactctactctagcctgggcaacacagtgagactctgtctcaaaaataataataataggggctgggcgcggtggctcatgactgtaatcccagcattttgggaggtggaggcgggtggatcacctgaggtcaggagtccgagaccagcctggccaacatggcaaaactccgtctctactaaaaatagaaaaattagctaggcatggtggtgcaggcctgtaatccagctactcgggaggctgagaagcaggagaatcacttgaacctgggaggtgaaggttgcagtgagatcacctgggcgacagaatgagactccacctcaaaataataataatagtaataataataaatgaaaaattttaaaattaaacaattaaaaattttaaattaaaattaaacaaattagatgcccaggaggatacaggagagcatttgccaccaggcggactccctgtacccacccggccacagggggcgatgttcctgggagacaggaaatgcccaggggctgggagaccctctgctcttctgctcccttcctgtgtgctgcctggcaatggggaactctgagggctggtgagcagggctgctgaggagtgggtctaaggagtccctgcagggctgggccagctcctccacctcccctttgtcttcccctcccacttgttatttttagctacagtgtctgtccctcttgcttctcccccagattgggagaggaaacggaggcctctccctccgggcctagcctgttgcccccagcaaccgggcccaaacaggcctgtggccggccctggcttccatatctggcatcagagttgggctgagcagggtgactcagagggtgggtcagcgcctggcccggtgcccacctagcccctttgctgtgctggtgcctttcttccccaaacagccccaagggcccgggcctgctgcagctggggagccggacttccttgtcccaccaggcacagctcttcagacccctgccttgggtcacatttgcaagtgccaactctcatttctaccttattcttttcctctctgttcccctccccaccccctctcttccctctttctgagatcagatttgccagtgatgggaagagttagaaacaggatgcccagcccttctcgcctcaagaggccactgggatgcagccactcctgtgcttggggaacctggaggatgcaagggaaaggactggcactctgctggcacagcacccggcctggggcaggacacgggcgaagccagggtctcccctgtgagcactagaggatttcccgacccctgcccgggtattgtgtgcctgagcatgagtcacctgaggggcccaggttcccacccttcccagctcctctggcctgccccaccctgtcctccctgccaacccagcacggggacggcactcagcgtgtgctcagctttcctgatgccaacccccagtggagtgggctgcaccaccaccctgggaccgaatgcctggctagggtctactttggtccctgctaggtctgaggacccctcctaggaaggaaatggcacttgggggcgggggcagggaggagggaggagagacactgggctctactgtacccctagtcatctcttggggtgtgcgtgtggctccctggccacagagctcccaaggtctgagtcatgagcccatgggtgatagtggcttcttccccgcagatgggagctccccgtgcctaagaaaaccacaaaggttcttcctcacttccctctctgctcgtggtttttctcatctgcagggtgtgtcttagtcctttaatctcctctctttgcagtgctagtcaaaacctccaccagggaaagacaaataacccccttactgtttttttttttttttttttttttttttgagatggagtctcgctctgtcacccatgctgtagtgcagtggcacaatctcggctcactgcaacctccgcctcccaagttcaagtgatcctcctacctcagcctcctcagtagctgggactacaggtgcacaccaccgtacccagctaaattttttttttttttttttgagatagagtctcactctgtcacccaggctggagtacagtggtacaatctcaactcactacaatctccgcctcccaggctcaagcaattctcgtgtctcagcctcccaagttgctgggactatggacgtgcaccaccttgcccgactaatttttgtatttttgatagagtcagagtttcaccatgttggcaggctggtctcgaactcctggcctcaagtgatccacctgccttggcctcccaaagtgctgggattacaggtgtgagccaccacactcagccagcccccttactttccttggagaccatatactgtggcttgtgccaaagtggtacagcatggatttccagctcccctatctacttgctgcgggaccctagatatagctttctgtgcctatttcctcaattgcataggaatagcacctatcgcatagggtagctgtgaagatgacgtgagttaacataatatttagagcagtgcttggtacctaataagctctatataagtgtttgctattatattattattatcactgccaccaccgcttttgcaagcagcagaaggtgaagaggttagactgaagaaaaaacttctgtgctcatcagcccataagctcgcagagcacagggatcatgcatctatgttttcctcagtcagtgtctgccaggcactggcaaggaaaggctgttaccagggggaactccaggaattcctcctggcacctaaggaggctggggagacaggactagggaaaaggtgcccttgagacaccttctgaaatcatcccattgccttccagcttctttcagctcaggctggctggtcagggaaacgctttgtgccatagtgtctgccctcttcctcctcctggcttctccattctctctggaacttgtggcttaggaaagcagtgaggtggaggaggaggaaccctagatcagcagctagaattgactggaatgctgctgctggctttcggtaattgacactgggccattcaccttcctcctttgcacctcagtttcctcatctataaaagggagagggttgagctgaatcaactctaagctccttctagttctctaaattctgagagcctcctagtacagccagcagcagccattagccttcagggtagagaggcctcttctgggaagccccagccagcctgggggtcagcccaaggagctcggaatctaagttgccccagttgcttcactttaccagcggtttttcttcattttccctcctccccctgcagctgcttcagcttcggaaaagttctgaagtcatggaaagttggggctgtgctcccagccaggggctaggccggatggcagccaaaacctgagctgggttttgactttatttttagcttttctgactgagacagaggagggaatacattctccggttctggaaggggctcttttttgcaggagacagacacttacattaaacaacttgttctgaggtgtggccagaggcctggactgagcaagtgtgcaggctgggggagcttcctctggcttctcatgtccttcccctgcccctctgagtgtcactctatcctcctccctgcctggtggggggaggtgggggtgactccttttttggactctcctaagcagaacactgcctgggtctcgtcctccagagcttctgcaaatctagccttccctatccctcttcacagtgaattgctgggcctcttggagtttaggacttttgtggtagaagaaaaatgttggcagggctgcttttctcctttccaggatagatttttccttctgcccacgcttggttttccttttttccatctgctgtggtgggctcatgcttaagcactgatgagttacagatggcagctggaaccaggtcctctggatctttccctccgctccctgggtctgctgctttctctcaccctatatttgtgaagcaattgtaacatctagaaagttcttgggttctctggaggtttttaagaaaataggacctttctatttctccagtccactagcaaaaataatcaggggcccagaaaaggtgagggaggtggcagaggcagcgctgttcgactggttatagctaaagctttacccactttgaggagcagggaggcttaaagctggggcccagatggacctggaggcctgggatccacatctggaaccagatgctgaggctatggtagatgggtagggctcagccttctcccagggcacggatgaggcaggagggagggaggcagggacccctctgttcagtgcagatcagggcacccagactgggtcctgagaaaggaaagggtcaatattgtgcctggtcatccttgtctgaggtccctctgagctctaaccagactttccttccccacagtcccacatgtgtaaaagggactaggagaggtgaccagtacctttggggctcagatcgagaagtgctagggacatgtgggccatgagcttagttgtcaggctcctcagagggagggaagcttggccaaagggaagtgagtagagtccagggagaaggctaagtaaggccctgtgtgggaaggggcaggagacaaaggtacccctgtctctttgggaaagaatgggaggagagagagggaaaagcattcatatcacggggtagagctctgcccttggccccaggcacgttcctgagccctgagtcatgggaagggtggagaagcaggaagggggttttcaaggaccttggggaggtgggagcccagccccagaggcaagcagatgcaaaccaacctaatgcaaggatgccctctcctggtaattgcaggcatagcagcgccagcccccatggctgacctcctgggagcctggcactgtctaggcacacagactccttctcttaaatctactctcccctctcttctttagcaataccaagaaggagggtgacctgatagctgctcaggctcggctgaaggacctggaggctctgctgaactccaaggaggccgcactgagcactgctctcagtgagaagcgcacgctggagggcgagctgcatgatctgcggggccaggtggccaaggtgaggccaccctgcagggcccacccatggccccacctaacacatgtacactcactcttctacctaggccctcccccatgtggtgcctggtctgacctgtcacctgatttcagagccattcacctgtcctagagtcattttacccactgaggtcacatcttatcctaatttggctgccaatgggatctaccacagtgaatttaaaataatccaggaggccgggcatggtggttcacgcctgtaatcccagcactttaggaggccgaggtgggccgatcacgaggtcaggagatcgagatcatcctgactaacatggtgaaaccccgtctctactaaaaatacaaaaaattagcctggcatggtggcgggcgcctgtagtcccaactactcgggaggctgaggcaggagaatggcgtgagcctgcgaggcagagcttgcagtgagctgagatcatgccactgcactccagcctgggcaacagagtgagactccgtctcaaaaaaataataataataataataaaaataatccaggccatgtgtggtggctcatgcctgtaatcccagcattttgggaggccaaggaggcaggattgcttgagtccaggagtttgagaccagcctgggcaacacagaccccatctctagaaaataaaaatttaaagaaattagctgggcatggtggtgtgcacctatagtcccagctacttgggaggctgaggcaggaggatggcttgaacctgagaggtcgaggatacagtgagctgtgattgcaccactgcacttcagcctgggtgacagagggaaaccctgtctctacataaataaatacataaaataaaataatccacaagccatttctacttaactttgcaatgaactgtacctgaccctagatccctcccagtttggccctccggtatacaagggcctcctataggcccttgtgatttctctggggaaaaggaggactggagttgatcatttattgaggccatcagaagcggatggctaattacatatgggacatgtgttaataatgctttgtgtatatagagtggcctttactttcaaaacactcttctccaatttatcatgttaaaagctaggaattgggctgggtgcagtggctcacgcctataatcccagcactttgggaggccaaggcgggtggatcatttgaggtcaggagtttgagaccagtctgaccaacatggttaaactccgtctctactaaaaatacaaaattagccaggcgtggtggcacacacctgtagtcccaacaactacttgtgaggctgaggcaggaaaatcatttgaacccaggatcagaggttgtggtgaactgagattgcaccattgcactccagcctgggcaacaagagcaaaactctatctcaaaaaaaataaaaaatagccaggcacggtggctcatgcctgtaatcctagcactttgggaggcagaggtgggcagatcacctgaggttaggagttcgagactagcctggccaacatggtgaaaccccatctctactacaaatacaaaaattagctaggcatggtggcagccacctgtaatcccagctacttgggaggctgaggcaggagaatcgcttgaacccgggaggtggaggttgcagtgagccaagatcgggtcacagcactccagcctaggcaacagagcgagactccatctcaaaaaaacataaataaataaaaataaaaataaataataaataaaagctaagaatcaaagaagcagtttattcctaatttcacagtctcatctgttcatagtggggccaggattagagtcagtggccaagcttccatcctgggttctttcccttcccaggccctaccatcatagtataccagggaaagacctggagaagccagcaggttgaccaccgaaccaaggctgggccaccttcctcctgggtctggtctccagcctcccagttgtacccttcccccagcccttcctggatgcactgatcagcctgtgcttccttgccctgtttttctttataaatagagccatgttctcctctctctctctctcttttttttttttttttttttgagatggagtcttactctgtcacccaggctggagtgcaatggcacgatctcagctcactgcaacctctgtctcccaggttcaagcaattctcctgcctcagcctcccgagtagctgggattacaggtgcccaccaccatgcccagctactttttggatttttagtagagacagggtttcaccatgttggtcaggctggtcttgaactcctgaccttaggtgttctgcccgcctcagcctcccaaagtgctgggattacaggcgtgagccaccacgcctggcaagacgtgttctctctatgttgttgaggctggtcttgaactcctggctgcaagagatcttcctgcctcagcctcccaatgtgctgggattataggcatgagccaccacacttagcccagcctgtgctttcttaaatgaaaatctaagcatacggctgggtgtggtggctcacgcctgtaatcccagcattttgggaggccaaggtgggcagatcacgaggtcaggagatcgagactatcctggccaacatggtgaaaccctgtctctactaaagatacaaaaattagctgggtgtggtggcccatgtctgtagtcccagctactcgggagactgaggcaggagaatggcatgaacctgggaggcagagcttgcagtgagctgagatcgcgccactgctctccagcctaggtgacagagcgagactccatctcaaaaaaaaaataaaaataaaaaaaagaaaatctaagcgtggtgctcccctgctcaaacatcctcaggttcttttcatggcagataagggcatctcttcatgagccagcccctgcctactgacccagccacctctcccatcccttcccaccccgtacttcaggcttcagcagtactgatctttccaaagaccccagaacacacatgccttcatacctctgtgcctgtacatgcttgtttctgcccttgaaatcatgacagtagctctctgtaggccccgctagcctgtcccttgggtcttagcctcttggaggccttcccagagccccccaaaagtaccccaggcatactttggttccttctctcatgtcccctcagtactttgcacatacctcctttatagcagttgctatgttgtgccagagaagggagtcctgtggctggggggcatatatcttttctttttgagacagagtctagctgtgtcacccaggctggagtgcagtagtgcgatctcggctcactgcaacctccacctcctggattcaagcgattcttgtgcctcagcctcctgagtagctgggactacaggcgtgtgccaccatcatgcctggctacttttttgtattagatatatattttctctcttagcacagtacctaccaagagtgagtgagtagatgtcctgacccctgcaggcatccaaggccctccttccctggacctgtttccacatgtgtgaaggggtgcacaggcagcagcccacctctcagcttccttccagttcttgtgttctgtgaccccttttcctcatctctgcctgcttcctcacagcttgaggcagccctaggtgaggccaagaagcaacttcaggatgagatgctgcggcgggtggatgctgagaacaggctgcagaccatgaaggaggaactggacttccagaagaacatctacagtgaggtggggactgtgctttgcaagccagagggctggggctgggtgatgacagacttgggctgggctaggggggaccagctgtgtgcagagctcgccttcctgagtcccttgccctagtggacagggagttgggggtggccagcactcagctcccaggttaaagtggggctggtagtggctcatggagtagggctgggcagggagccccgcccctgggtcttggcctcccaggaactaattctgattttggtttctgtgtccttcctccaacccttccaggagctgcgtgagaccaagcgccgtcatgagacccgactggtggagattgacaatgggaagcagcgtgagtttgagagccggctggcggatgcgctgcaggaactgcgggcccagcatgaggaccaggtggagcagtataagaaggagctggagaagacttattctgccaaggtgcttgctctcgattggttccctcactgcctctgcccttggcagccctacccttacccacgctgggctatgccttctggggatcaggcagatggtggcagggagctcagggtggcccaggacctggggctgtagcagtgatgcccaactcaggcctgtgcctccacccctcccagtcaccacagtcctaaccctttgtcctcccctccagctggacaatgccaggcagtctgctgagaggaacagcaacctggtgggggctgcccacgaggagctgcagcagtcgcgcatccgcatcgacagcctctctgcccagctcagccagctccagaagcaggtgataccccacctcacccctctctccaggggcctagagtctgggccggatgcaggctggaagcccagggttgggggtgggggtgggggtgggaggttcctgaggaggagagggatgaaaagtgtccccacaaccacagagaagggtcgcaggatgtggagtcagatggcctgtgtgctgtttctgtacactcttacctcaccttcacttctcagggctttggttttcccattcgaaaatggaggctgttcttaatctccctaactcagagttgccacaggactctgcaatgtgaggtgttaaaagcatcagtatttttctagttggctgtgctatttgtgacaggagaaaaagtctagcctcagaacgagaggtttcagttagacaaggggaaggacttcccagttgccagccaagactatgtttagagcttgtgatgttcagagctggctctgatgagggctctggggaagctctgattgcagatcctggagagagtagccaggtgtctcctacaccgacccacgtccctccttccccatacttagggcccttgggagctcaccaaaccctcccaccccccttcagctggcagccaaggaggcgaagcttcgagacctggaggactcactggcccgtgagcgggacaccagccggcggctgctggcggaaaaggagcgggagatggccgagatgcgggcaaggatgcagcagcagctggacgagtaccaggagcttctggacatcaagctggccctggacatggagatccacgcctaccgcaagctcttggagggcgaggaggagaggtgggctggggagacgtcggggaggtgctggcagtgtcctctggccggcaactggccttgactagacccccacttggtctccctctccccaggctacgcctgtcccccagccctacctcgcagcgcagccgtggccgtgcttcctctcactcatcccagacacagggtgggggcagcgtcaccaaaaagcgcaaactggagtccactgagagccgcagcagcttctcacagcacgcacgcactagcgggcgcgtggccgtggaggaggtggatgaggagggcaagtttgtccggctgcgcaacaagtccaatgaggtaggctcctgctcagggtctaaggggatacagctgcatcagggagagagtggcaagacagaaggatggcatgtggagagaggaacatccttgccctcagagggtggaccagggtgagcctgtatatctcctccacactctggttccaggcctggctcctggactctttggctgtgagaccttgagcaggttatttaacctctcagagcatcagtttcctcatctgtaaaatggggatgaatactgatccctaagtctttgagttgtcaggaagatgaaagataaggtatccgtgtgcctggtgctgcgtatgtgtccacagatcatggctattatccccgggggaagggcagtgacaggggtgtgtgtagatggaaggagaggcctcaattgcaggcaggcagagggctgggcctttgagcaagatacacccaagagcctgggtgagcctccccgaccttcctcttccctatcttcccggcaggaccagtccatgggcaattggcagatcaagcgccagaatggagatgatcccttgctgacttaccggttcccaccaaagttcaccctgaaggctgggcaggtggtgacggtgagtggcagggcgcttgggactctggggaggccttgggtggcgatgggagcgctggggtaagtgtccttttctcctctccagatctgggctgcaggagctggggccacccacagcccccctaccgacctggtgtggaaggcacagaacacctggggctgcgggaacagcctgcgtacggctctcatcaactccactggggaagtaagtaggcctgggcctggctgcttgctggacgaggctccccctgatggccaacatcggagccagctgcccccaacccaagtttgccaattcagggcccctttctagagctctctgttgcaggctccagacttctccacccagtaggcaaaccaaaagatgcttcctcaacagcacaaggggtggaagttagacagtgaggattgttaaaggcagagccatactcctacccggagagcttgacagtgtccctctggggtggaaatgagttccttagctccatcaccacagaggacagagtaagcagcaggccggacaaagggcaggccacaagaaaagttgcaggtggtcactggggtagacatgctgtacaacccttccctggccctgacccttggacctggttccatgtccccaccaggaagtggccatgcgcaagctggtgcgctcagtgactgtggttgaggacgacgaggatgaggatggagatgacctgctccatcaccaccacgtgagtggtagccgccgctgaggccgagcctgcactggggccacccagccaggcctgggggcagcctctccccagcctccccgtgccaaaaatcttttcattaaagaatgttttggaactttactcgctggcctggcctttcttctctctcctccctataccttgaacagggaacccaggtgtctgggtgccctactctggtaaggaagggagtgggaactttctgatgccatggaatattcctgtgggagcagtggacaagggtctggatttgtcttctgggaaagggaggggaggacagacgtggggcatgcccgccctgcctctctcccccattcttgttgcatgcatatcctctcatttccctcatttttcctgcaagaatgttctctctcattcctgaccgcccctccactccaattaatagtgcatgcctgctgccctacaagcttgctcccgttctctcttcttttcctcttaagctcagagtagctagaacagagtcagagtcactgctctggttctctgtccccaagtcttcctgagccttctccccttttatgtcttccctctcctcctccgggcccctagcctcccaaacccccattgcccgctggctccttgggcacagaaccacaccttcctgcctggcggctgggagcctgcaggagcctggagcctggttgggcctgagtggtcagtcccagactcgccgtcccgcctgagccttgtctcccttcccagggctcccactgcagcagctcgggggaccccgctgagtacaacctgcgctcgcgcaccgtgctgtgcgggacctgcgggcagcctgccgacaaggcatctgccagcggctcaggagcccaggtgggcggacccatctcctctggctcttctgcctccagtgtcacggtcactcgcagctaccgcagtgtggggggcagtgggggtggcagcttcggggacaatctggtcacccgctcctacctcctgggcaactccagcccccgaacccaggtgagttgtctctgctttgtctccaaatcctgcaggcgggtccctggtcatcgaggggtaggacgaggtggccttgcaggggggagagcctgccttctcttccgcagcccgggggagtgggagcctcctccccacagcctgagtcctagacagcccacctctgcatcctgcccctcttgtctgagccccagactggagggcaggggcagggctggagtgtgagggatgggggagatgctacctcccttctaggggccaggggagggagggtctgggtccaggccctgctgctcacacctctctcctctgttttctctcttagagcccccagaactgcagcatcatgtaatctgggacctgccaggcaggggtgggggtggaggcttcctgcgtcctcctcacctcatgcccaccccctgccctgcacgtcatgggagggggcttgaagccaaagaaaaataaccctttggtttttttcttctgtatttttttttctaagagaagttattttctacagtggttttatactgaaggaaaaacacaagcaaaaaaaaaaaaaagcatctatctcatctatctcaatcctaatttctcctcccttccttttccctgcttccaggaaactccacatctgccttaaaaccaaagagggcttcctctagaagccaagggaaaggggtgcttttatagaggctagcttctgcttttctgccctggctgctgcccccaccccggggaccctgtgacatggtgcctgagaggcaggcatagaggcttctccgccagcctcctctggacggcaggctcactgccaggccagcctccgagagggagagagagagagagaggacagcttgagccgggcccctgggcttggcctgctgtgattccactacacctggctgaggttcctctgcctgccccgcccccagtccccacccctgcccccagccccggggtgagtccattctcccaggtaccagctgcgcttgcttttctgtattttatttagacaagagatgggaatgaggtgggaggtggaagaagggagaagaaaggtgagtttgagctgccttccctagctttagaccctgggtgggctctgtgcagtcactggaggttgaagccaagtggggtgctgggaggagggagagggaggtcactggaaaggggagagcctgctggcacccaccgtggaggaggaaggcaagagggggtggaggggtgtggcagtggttttggcaaacgctaaagagcccttgcctccccatttcccatctgcaccccttctctcctccccaaatcaatacactagttgtttctacccctggctgctgtggtgtctttgttggtggacgtcgctgtgtgtactgaggtgcagactcgtgggcatgcgcgcgcgtacacacacacacacacacacacacacacacacacacacacacacagcgccgcacggtcactgcatcctcctgctcattgctgcccagccctgccctgctccaggggaaacaattagagatcagagcactttgggtgcacatctgggcactcggtggtggctgagggggaaggctttgatataaccatcaccacccactgtacggctctctcccaacggaagtccttcagagaagcagcacctgaaggagggcatttgctaactaacttccctcgtccaccagcacttactgagtgctttctctgtgctgggccctgagcgaagcatgaatataagacatatgatatagacccagtctgagggtggtgacatatcaggacgtaaggacaaggacacccggggaggagggaacagaagctgcaggagagggcagaggaaaggagcagttaatgtccctttgtgccatgttgtgctcaggttgggggattgggaaatgaacaagacaagatgcccactgtcctcagagaaattacaccccagtgggagtcagaaaatagactgcagacaaagggatatgttaggccaagtaggagcctccgagggggttccaacctgggggcatgaggtgcccagactgaggggaggggccccaaacagggaaaatgagctatagaagccagcctttctctggcccttcctagtttccaaagcatttctgcagcatctcatttggccttcgtactgtcttgagaggtaggtattgtctcccagccctctggaactcaggccactcagctcgaaggtggcacagatcccaagattctggaagtttatttatgttccttgggcagagttgagcctgcagtcaagagtcagtgagaaacgggcatgtctggctgggatcgtgggaaaacatgtgagaaagcaaaattactgagaggagaagggcccctgaggtcatgctggacgctcctgattccaccataggctgagaccccacagtgcctttagggaagggaagttaagcggaaggaggtttgaggaaggggtccctgcttgggttggcagtttccaagaaggaaacccttcctctcctaggcctcagcaaagaccctgaggccccgcagatatggggtcttagatgtcagcgagggagtccgtgtgtcccaaaatgaggactcccacctgcagttcctgggtcgggcaccttggggcgccagagccccaccacggtggtgcctgcacatcctgggtaggggtccttcgctactcagctgaaccctggtgagctggctgcatgggcactgtgggctggggaacaccaggggcagcaggcaacgttcctagctcttgaggaggagggctgagggcatagggccgcacacaaacactgccccacaagctggcagcacggcgggggcggcagccggggactcagcagttaaggtgtccacacacgtggtcacctcacatgatgctcacagcacaagtcagcactcagcagccacatttcattatgtaaaaaaaaaaaagttgttgttgttaaaatgtaatacatgcttggcctagcgtggtggcacgcacgcctgtagtcccagcaactcctggcctgaggcgggaaaattgtctgagctcaggagttctaggccagcctgggcaacagcaacaacaaaaatacatatcatatggtaaaattcaaaacacaggtaagggatggacacagtggctcacgcctgtaatcccagcactttgggaggctgaggtaggcggatctcaggtcaggagtttgagaccagcctggccaatgtggcaaaatgcctctactatacaaaaattagctgggtgtggtcgtgcatgcctgtaatcccagctattcgggaagctgaggcaggaggatcgcttgaactgggtggcttatgttgcagtga

SEQ ID NO: 767-769 - skipped (3 entries)

SEQ ID NO: 770 - DNA, 66877 bp, Homo sapiens
ttcactcttgttgcccaggctggaatacaatggcactatctcggcccactgcaacctctgcctcccaggatcaaacgattctcctgcctcagcctcccgagtagctgcgattacaggtgcccaccaccatgcctggctaattttttgtatttttagtagagatggagtttcactgtgttggccaggttggtctcaaactcctggcctcaagtgatccacccaccttgtcctcccaaagtgctgggattacaagggtgagccactatgcccggccacaattacctaattctaaggcttcaagattttccattctttttccttgattttcaatggaaacacatgattactattagtaagcgttactatttagccttcacatgttgtatgtctaacacactgcatatattgttttattaaatctttacaaatcctgtgcaaggtaaaaaccattcccattttcttttctttctttctttctttttttttttttttttttatgagacgagtttcgctcttgttgcccagcctggagtgcaatggcacgatcttggctcactgcaacctccacctcccaggtttaagcgattcttctgcctcagcctcctgagtagctgggattacaggcatgtgccaccacgcccggctaattttatatttttagtagagatggggtttctccatattggtcagactggtctcgaactcccgacctcaggtgatctgcccacctcggcctcccaaggtgctgggattacaggcgtgagccaccgcgtccggcccccattttctttttctttcttctctttttttgagacgcagttttgctcttgttgcccaggctagagtgcaatggtgccatctcagctcaccataacctctgcctcccaggttcaagcgattctcctgcctcagcctcccaagtagctgggattacaggcatgcgccaccacgcccagctaattttgtatttttagtagagacggggtttctccatgttggtcaggctggtctcgaactcccgacctcaggtgatccacctgccttagcctcccaaagtgctgggattacaggcatgagccaccgagcccggcatgtgtttttttgttttgttttgtttttgagacggagtctcgctgtgtcgccaggctggagtgcagtgacgcgatctcggctcactgcaacctctgtctcctgggttcaagagattctcctgcctcagcctcctgagtagctgggactacaggcgcgcaccaccatgcccagttaacttttttgtatgtttagtagagacggggtttcgccgtgttggccaggatggtctcgatctcttcacctcgtcatccgcccgcctcagcctcccaaagtgctgagattacaggcgtgagccactgtgcccggctccatttccattttccttgaaggaaatcacggaataattttcttaaagttatacagctatcagtagcacatcctcaattgtctgactccaagaaagttgttttatataataggatatgtataatgtgagcctcttcaaataatctgaaaattgaggaactctatcaatagaaagcttcaggccgggcgtggtggctcacgcctacgatcccagcattttgggaggctgaggctggtggatcacgaggtcaggagttggagaccagcccgaccaacatgatgaaacctcgtctctactaaaaatacaaaattagcccggtgtggtggcgcaggcctgtaatcccagctactcgggaggctgaggtaggagaatcgcttgaaccctccaggaggtaggagatggaggttgtggtgagctgacatcgcgccactgcactccagcttgggcaagaagaacgaaactctgtctcaaaaaaaaaacaaaaacaaaaacaaaaaacaaagcttcatggggttgagagcaatagagatcattgctggaatcacatataatcttaaaacttaaaaaatggacaggaaataattttaaaagaaaactgacaattttttttttttttttttgagacggagtctcgctctgtcgccaggctggagtgcagtggcgcgatctcggctcacgacaacctccgcttcccgggttcaagccattcgcctgcctcagcctctcgagtagctgggactacaggcacgtgccaccacgcccagctatttttttttttttttttttttgtagttttagtagagacggggtttcactatgttggccaggatggtctccatctcttgacctcgtgatccgcccgcctcggcctcccaaccaagtatttttaaaagacaggtaaaggggagcaaggaatgaaaaccataaaaccatatggattgactatatcacctgtcgtagtggaaagggtctcacaaccaagtgagaacaagcagatttacattccaatcctggttccacagcctgggacccagcactcaccttcttttggtctaatttcctcatcggtaatttattttatttaactttaaaaaattttttttatttttttgcagatagggtcttgctttgacgcctaggcagtgtcgcaatctcagctcactgcaacctctgcctctgaggttcaagcgattctcctgcctcctgcctcagcctccggagtagctgggactacaggcgcgcgccaccacaccccgctaatttttgtattttcagtagaggcggggtttcactatgttgacaggctggtctggaactcccgacctcaagtgatctgcccacctcggcctcccaaagtgctgggattacaggctgagccaccacacccggccggttttctcatcagtaatttagattttaaagttccctttaagattacttgaatacttaaagtctaagcttttcgattctttatttctcaatgaggttaagaaaggaagtatttcatggccaggcgcggtggctcacgcctgtaattctagcactttgggaggccgaggcgggcggattgcctgagatcaggagttcgaggccagcctgggcaacacggtgaagcccagtctctactaaaatacaaaaaattagccgggtatggtggcgttggtcccagctactcaggaggctgaggcaggagaatcgcttgaacccgggaggtggaagttgcagtgagctgagattgtgccattgcactccagcctgggcgacagagcaagactccgtctccctgccatcctcccccccacccccccaccccccaaaaagcaaggaagtattttaggaaaccggacaggaaatagaaccattaataaggagaatgtcatcattcacagagtgccaaaaattcatctgggatgaatatgcagctcccagtgctcttcactaattcttatgtacatgacttgattaacagttaaagaatatcctggtctccatttctgccattttaaaagtaagtaaccattaattacagaagcgttcctaataggtggtaaggtggtcatctagggtatagctaagggccagactcgagtcaattagaatcctgggacctgtcaaacgcagtcctgcggagcagccttcagacagtgaatctataaaatggatggtttctttctttcttttttgagacggggtctccctgtcacccaggctggagtgtaatggtgccatctcggctcactgcaacttcccctttccgggttcaagggattctcccacctcagccttccaagtagctgagattacaggcacccgccatcatgcccggctaatttttgtatttttgtagagacggggtttcaccatgttggtcaggctggtcttgaactcctgagctcaggtgatcctcccccactcggcctcccaaagtgttgggattataggcgtgagccaccgcgcccgcccggatgaattttcaaatagaaacaatccagtttcccacatcacacggagattgtgtggatgggtaatccatgaaaagcctggtgctggcactcagtcccaataaatgttagctaaaaattaggaacttttcaaagggatgaatgtgctttctaatagaagtagctgccagtgacatcttgggagcctctttttaaaagcaaaaaattatttcatcttaaattttcacaagttcagatttttatgtacctgattttaacggagtatgaaacagcttgctctcgtagttactcaccgtcatatgttaatcgtatcatttctgagctgttttttgattttacaaacccttaaattaagaaacggattaggaaccgcccattaacactgttggcaaatgatttaaaatcagggttgctggtttttctgtgataatctatcggcttcaagacgcacagatctcactttcatggaaagaagttgcctgatacagttttccaccggagagaaaaataaaggctggtacttggaacctgcaagccgtgcatttggaacctcggactcaagtgcctattacgtaattccacagcgtcccggcctccaggccgtttcccgagccctccagcggagcgggggataaggttaccacgcccgcggtggccggggacactctgagtttcgcgtgtggcttttagggacgtttatatttgaatttccctgaaccgccgagtgtgggcggtggcgcagatccgtcccggaaacctccgggctccttcccgcctttctcaggcccggcccctccaaggggtccccgcggggcggcgggagggccctgggcccagagccgcgcgggtgggcagtcccaggcgtccttccttacagccctgagcctggtccgggaaccgcccagccgggagggccgagctgacggttgcccaagggccagattttaaatttacaggcccggcccccgaaccgccgaagcgcgctgcctgctccccattggcccatggtagtcacgtggaggcgccggggcgtgccggccatgttggggagtgcggcgccgcggcccgcgccacctccgccccccgcggcttgcctccagcccgcccctcccggccctcctccccccgcccgccgctccgtgcagcctgagaggaaacaaagtgctgcgagcaggagacggcggcggcgcgaaccctgctgggcctccagtcaccctcgtcttgcattttcccgcgtgcgtgtgtgagtgggtgtgtgtgttttcttacaaagggtatttcgcgatcgatcgattgattcgtagttcccccccgcgcgcctttgccctttgtgctgtaatcgagctcccgccatcccaggtgcttctccgttcctctaaacgccagcgtctggacgtgagcgcaggtcgccggtttgtgccttcggtccccgcttcgccccctgccgtcccctccttatcacggtcccgctcgcggcctcgccgccccgctgtctccgccgcccgccatggcgactgcgacccccgtgccgccgcggatgggcagccgcgctggcggccccaccacgccgctgagccccacgcgcctgtcgcggctccaggagaaggaggagctgcgcgagctcaatgaccggctggcggtgtacatcgacaaggtgcgcagcctggagacggagaacagcgcgctgcagctgcaggtgacggagcgcgaggaggtgcgcggccgtgagctcaccggcctcaaggcgctctacgagaccgagctggccgacgcgcgacgcgcgctcgacgacacggcccgcgagcgcgccaagctgcagatcgagctgggcaagtgcaaggcggaacacgaccagctgctcctcaagtgagtgctagctggcggccgcgttagcgccaaggaggggcgggggcgcaaccgcggcgaccagctcaccgggttctgccgtggggagggagcagaggccaggatgcacgcgtccttctgaaggaacagggtctcggtctccggaaaggagaaagaatctagagttcatagcggagcaggggtcgcggagggggctcgagctgtagcgctggggggccgtgatgcccatttctagattttggatacccgctgggacgtggtaagtgcgcgcctgggactgccgagaaggagctcccgctttcgcactcgaatccggggagccggcgcggagaggcggcccctcaggccccaggtgcggggagctggagcgcgagcgcgcgctcgcgtgcgcgccccagtttccggccggcgcgagacaaagcgtctagcggatttgcagtgccgggatgggcggccggggaggactggcagcccgcctctagaatgaatgagcttcgcgcgggcagagagaggaaggggagggaccttcccgcagcatccgcgtctcctgggggtgggtcccgctttggcgcgctcagtcttggccctgtgacgttttgcgaagattctacgcctgctttaggcgggagagagaggcggagcttgatccgtgcgcctccagccagccccgggcaagttaggtttgctagctggttagctttctctggggaaatgtgtcctgtcccagcggggatggtgcggtccctcgggtggttctgcgcagggaaggaaagctgggtttgtgcatgtcacggctaccgttcttagaattgcggttctcctacccctcaggcagcggccctctgtccccagcttttgcctcctcgtagtatagtcaggctttcgggtagagactgtgcttagtaccccttagtcgaccactgtgcagatagtagaccagggcaggtgacagggtgctgtgtaaatgctgagtgtttgagcgaaggagagtttgtaattcacctaagcgagtgcgagttttcattccagtgcacaaggatacatttgcagacctttgctggccttattttgactttctgataagcaaaatggcctgtcatcagtaggcaacaagtgttgatgtcatgctttagagatttgcaaaatttgggtctgaaattcatggtcgccattagcactgccagctgaaatttctggaggtaccttattctcactttgacaccctttgcccctggatgtctttctgtctgtatctgcgtgaatgtccctgtccgaagtctctgagattttgtgtatttttacttatccctcctatcatatgttttcggttcataaaaaagcatgtgcacgtggtaagaataaaatagtatagactggtttgtagcgaaaaacgataactgcactacctctttccggaggcaatcacatttatccctttttgtttttatttctttggatatttagttatacaactcgaaaataatactaagcttgtatttccctttcttggatttactaagccttggtttcatcttttaaaatgagcagtcagttaactcacactattatttctatgttcctccaaattttttgccactgaattccttcaaatcttagatatcgttgcttgtaagacttgccattattatgtgtaccactaagaaaataaaaacatcaggaccaactgtgtaggatccatcctgttggacccatcatgatgggtttcatagatattaaaatgtcaaacagggccgggcgtggtggctcacgcctgtaatcccagcgctttgggaggcgaggtgagcggatcacttgaggtcaggagttcgagaccagcctgaccaatatggtgaaaccccgtctctactaaaaatacaaaaattggccggacgcgggggctcacgcctgtaatcccagcactttgggaggccgaggcgggcggatcacgaggtcaggagatcgaggccatcctggctaacaaggtgaaaccccgtctctactaaaaatacaaaaaattatccagacgtggtggcatgcatctgtagtctcagctacttgggaggctgaggcaggagaatcgcttgaacccaggaggcggatattgcagtgagctgagattgcgccattgcaccccagcctggcgacagagtgagaccccatctcaaaaaagaaaaaaaatccgggcgtggtggcgggcgtctgtaatcccagctactggggaggctgaggcaggagaatcgcttgatatccaggaggcagaggctgcagtgagccagatggtccactgcactccagcctgggtgacagagtgagactccgtctaaaaaaaaaaattaacacagatcaaatatctgttgcgtaccagtcaccgttctatgttagaggatatgaagatttttttaaaaaaatgaattactgttctttgttgctgagagtgtagtgggggagctatatcccagcaagtaaagaaagattgtcttttgtctgatgtgaagcattttgatgctggcgcttttgtaatctttccaggagttagccacaggaggtttttcacacagtaacaaggctgccacctggctgacagtagttgtaaatgtatcgattctaaaatgcatgctggtttcagcggggttaaaaaatgagaataatgtgtattagaatcaatgaaataatgcatgtgatacaatttaggtaatagcagatgctaagggaataaaaataaagcggagtgaagggttagtgtgattaaggaaggcctgtctgaggagttgacagtacctattctctgagggttagtagtgttctgggattatatttttcttaagtctgtgctactgtatgtatattcctattgccaggattagatgactcttcttttccccccaacataccatcatttgctcaaaacatgccacattttagtttgctccttatttgaattaggactttttttatatggatttattcctcaatagcttttcatttttcttgttaagaaaaatttgccctcagtgtgtttgcagactttttgaagatatttaatcataatatctatcacatgaatctgctttcttccctagagttctctttgcttaaggtaggctgtgtactgatgtcctgtaacttattaaagacagcttcctggccaggcacggtggctcacacctgtaaagcactttgagaggcctaggcaggtggatcacctgaagtcaggagttcaagactagcctgtccaacatggcgagaccccgtctctactaaaaatacacaaattagccgcgtgtggtagtggacgcctgcaatcccagttactgtggaggctgaggcaggaggcattgcttgaaccggggaggcggaggttgcagtgagctgagatcacaccaccgcactccatcctgggtgtattttccttttccttggtttcttcatattttgttgaagaacatccttaagtaatttattcagaaaggatggcaggaggtaaactttctgagtcctgtatgtctgaaaatagctttgggctaggtatagaatactaggttaacatttttccagaacttggaaagtattattttgccctattgtcttctggcatctagggttgttaatgtctttcttttttttttgagacggagcttggctcactgcaacctccgcctcccaggttcaagcgatgctcttgacccagcctcccaagtagctgggattacaggtgtgcaccaccacacccggctaattttgtatttttagtagagacggggtttcaccgtgttggccaggctggtctccaactcctgacctcaggtgatccacccacctcggcctcccaaggtgctgggattataggcgtgagccaccatgcctggcctatatttaattttttatttggaactagagtgtttgtaattaagtataatcatcatttaggtagatttagattaagaaaacagctttgagagaattatagattccaggttacttagtttctttttggttcctcagcaaacaagataccttagaggcagagcatggaaatgcttggtctaaagagaatttggcaacagtttccatgcaggtggtgtctgaatccatagaaaacagacctcatatgtaaggtacagttactttgattcagtccaagactgattatattttgctgaaagcttttttgagagaacagtttccaaaaatgatgatgaatgccatcactcaacactttaaacaaaaagtacagagaaattgacttgtttcagattttcactgttaactatacgggaaaactagatataacagaaagttaagtgtttacatcagtcttcaataactgattttgtggattcagacatttattttccttcagtgatacaggtcccgtatcttttctgtaaaaccctgggggccagatgtgctttggaagttaaagcaattccaatttaagacggtaatatgatgcacatactggatatgacacccccagtggggtttatagatagagttagggtagatagagttagcactctatcatgaaacatttctgagggaaagatattgtcatggcaagtggagaaagacagattgaaaatagacctggtttcaggtcaggttttgccactaaatgtgttaataaaaattttaggttttcaaactctggaagtatagataaaagatggtgaatttttgtttttatttatttattttttgacacagagtctcgctcttttgcccaggctggagtgcagtgacacaatctcagctcactgcaacctctgcctcctgggttcaagcaattcttctgcctcagcctcccaagtagctgggattacaggcacccgccaccacgcccaggtaatttttatatttttagtagagaccaggtttcaccatgttggccaggatggtcttgatctcttgacctcgtgatctgcccgcctctgcctcccaaagtgctgggattacaggcgtgagccactgtgcctggtcaaaaacatgctaatcttctttaggagtgttttctttgtacataggatgattaattgaaaaacaaaaacctttggctgggcgtggtggctcacgcctgtaatcctagcactttgggaggctgaggtgggagggtcatgaggtcaggagttcgagaccagcctgaccaacactgtgaaaccccatctccataaaaatacaaaaatcagccgggcgtggtggtgcacgcctgtaatcccagctactttgggaggctgaggcaggagaatctcttgaacccagcaggtggaggttgtagtgagccaagatcgtaccactgcactccagcttgggcgacagagcgagactctgtctcaaaaacaaaaacaaacaaacaaaaaaaccacaaaaaacaaaccttcatcatcctgtgtattactatatctttttttaatgtactgattttgccctatttgaagcagattgacagtatacatcttggccttaatataagagttatcaaacttttatatttttataacttaaaatataagagttataaaactagttttctttataagagttataaaactagttaaactgcttttcatagttcttttataacagagttatgttaaatgttactttaattttcaagggaagacttggaaggaccaaacccctaaaaatgatttaaaagtctaggaagcaggtcccaagtaattaaactgtcatgacatttccttcccatgctttcaaaagatgtttgataaagcaagatcttttggagttgtttatttaacttaggggatgagactaggtaatattttgcatacccagattcaaggaagtaaacaggcagaatgaaagataaagcactattaaaatatggtgggtcttttcttttttgtgtctttacacagttgctggttatatttattctttcgtttgtatagatggtgtcacctctgatatgtctgagttagaaatcttcagactttttttttatgccattagtgtaagtctctttcatgtacaaatgttgagaatgagcctcaggtatcagttgagtaatgggaccctgtataggtcccattatttttaggatcagggaagtttttaaaatcagttttaaaccctttttacagtgtacctctttgataaggagattgtgctttggctgtcatttgatttttttttttttttttttttttttttgagacagagttttgctctcgttgcccaggctggagtacagtggtgcgatctcagctcactgcaacctccgcctcccgggttcaagcaattctcctgcctcagcctcccaagtagctgggattacaggcatgcgccactacacccggctgattttgtattttttttttaatagacttggggtttttccatgttggtcaggctggtctggaattcccaaccttggatgatccgcccgccttggcctcccaaagtgcggggattacaggcgtgagccaccgcacctggccggctgtcatttgaatttttattattttattttattttatttttttgaggcagggtctcgctgtgtcgcccaggctggagtgcagtggtgcgatctcggctcactgcaacctccgcccctccaggtttaagcaattctctgcctcagcctccggagtagctgggattacaggcacgtgccaccacgcccggctaattttttgtatttttagtagagatggggtttcaccatcttgcccaggctggtcttgagctcctgacctcgtgatccacccgcctcggcctcccaaagtgctgggattacaggcgtgagccaccgtgcctggcttgaatttttttttttttttgagacggagttttgctctgtcgcccaggctggagtgcagtggcgccatctcggctcactgcaagctccacctcccgggttcacgccattctcctgcctcactcagcctcctgagtaactggaactacaggcgccctccaccacgccgggctaatttttttttatatttttagtagaggctgggtttcaccgtgttagccgggatgggctcgatctcctgacctcgtgatccgcccgcctcagcctcccaaagtgctgggattacaggcgtaagccactgccctccgcccgaatttttaaaaattaattttattattattatttttgagacggagtcttgctgtgtcaccaggctggagtgcagtggcacaaccttggctcactgcaatctctgcctcccgggttcaagtgattctgccgcctcagcctcccaaatatctgggattacaggcacccgccaccatgcccggctaattttttttttttttaatttctagtagaaacggggtttcaccatgtcggccaggatcatctcgatctcctgacctcgtgatccgcccgccttggcctcccaaagtgctgggattacaggtgtgagccacggtgccctgcctaaaaattaattttttttttttttaataactgagtcttgctctgtcgccaggctggagtgcagtggcacgatctcagctcactacagcctctgcctcccgtgttcaagcaattctcctgcctcagcctcctgattagctgggactacaggcacacgccaccacgtcggctaattttttttttctttttctttttctttttttttttttgtattttagtagagacgaggtttcaccaggttgcccaggcttgtcttgaactcctgagctcaggcaatatctgcctgcctcagcctcccaaagtgctaggattacaggtgtgagccacggtgccaggccaaaaattaaattttttaaacagcaaatgtatattcattatagaaaaggagaaaacacaaacaccaagaagaaaattcttggttgggccttaggttgggcccaacccttaggttgggaccagcggctcatgcctgcaatcccagcacttttggaggccgaggtgggcggatcacctgaggtcagcagttcgagaccagcctggccaacatggcaaaaccctgtatctactaaaaatacaaaaattagccgggcatggtggtgggcacctgtaattctagctacttaggaggctgaggcaggagaactgcttgaacctgggaggcagaggttgcagtgagccgagatcgtgccactgcactccagcctgagtgacaaagcaagactccctttggggggtgggggaaaagatgcaggaaaaaaaaaagctgacatttattttgtgccaattctgtttgccaggcattacagtagatgctttacagacattatcttttttttttttttttttttgatgcagagtctggctctgtcgcccaggctggagtcctggagtgcagtggcacgatctcggttcactgcaggctccatctcttgagttcacgccattctcctgcctcagcctcccaagtagctgggactacaggtgcccgccactacgcccggctaattttttgtattttttagtagagacggggtttcactgttagccaggatggtctcgatctcctgacctcgtgatcctcctgccttggcctcccagagtgctgggattacaggcgtgagccaccgttcccggccagacattatcttttaagctcatgataactgctgatgagtaaggaaacttcaggctcagagagtttaagtattttgcctggtattacttagcaagtaatgaaagctagaaaggatggtagcctgacttctagcattgtgatagggtgttcacatacataaccttatttcatccatacaacagtgttctacaggtattactctggtttaccgacatgtagcaggctcacagagcatcattatctgtggttggtacttgaagtctcagataggatagttgattttcagatccctttgggtgctacttttggaaatgctactagttgcatgtttttcacgttgatagtttgtagccttcaagggaggtaattttggatttgtcagaagggtagtggtcagtagttgaaacagctgtttgaaatactgagggcttcatttgctaaagaaaggtgaagatgaattactgaaagagatcgcttttatcttttttctcttcttaaaaagctactttccaactttattccatgccttaataatttaaaagaaattaaaacctctaaataaatctttaatactcatgacagggtgttctttcattctttattcaagacacatttttgtggaacaggtactatatgccaggtcttgaaccagatgctgggaatagagaaatgggatactcagtccccattatcaagttacttacagtctagtggggaagacagaaaaccaacactacaggattgtgatactgtaagtgcagtatactaataaaatatattaagtgctgtgatgccagtatccaggtgttgctgtggagaaacaaggaccgctacctaaggcaggctaggagccgtgtgaaattttgaaagacatcccaggggaatctgagctaagtgcagggaggtaagtagggatttgcttctaaatggaaaatggagagtgagttgtcctgaatgtcaaataatttatataactggagccatatatatgtgtatgtgtgtgtatatatacatcttatatgtatatgttatatataacatatactttatgtatatgttacttatatatgaagtatatgttatatataacgtgtgtgtgtgggggtatatatatatatatatatatattttttttttttttttttgagatagagtttcactcctgttgttgcccaggctggagtgcaatggtgtggtctcggctcactgcaagctccacctcctgggttcaaatgattcttctgcctcagcgtcccaagtagctgggattacagccgcctgccaccacactcggctaatttttgaatttttagtagagacagggtttcagtatgtttgccaggctggtcatgaactcctgacctcaggtgatccacccacctcggcctcccaaagtgctgggattacaggtgtgagccactgcacctggcctactggagccatatatatatttaatacatggggtggggaaggggattgtatttttagtaatgagtggacccaagattttaaggcagaattgtgacatgatcattctggctatgctgtggagggaaaaaaagaggagaggtacaaacactagtaagaacacttggggagtaacaaggcagcccttgaactgaggcaggtggaagaaaggagagaaggtggatttaagagatactgaacataaaggactagggagaagaaagagtctagggtgactgcttccatgcttgggtgcctgagtagacaatattgctcttaaccgaaattggtggggaatgaacaggtttggaggaccctaagtcagtgaattagtggtgtttgccggactttaggtagcaatgttagttggcaatttgaagtactcaagagacatggaaagcatgcgcatatgaggactgggtagagaaaggagaacccacaatggggatgataagtaatagagaggtgaggctgggcgtggtggctcatgtctgtaatcccagcactttgggaggctgagtgtgtggatcacttgaggccaggagtttgagaccagcctgggcaacatggcgaaaccccgtttctactaaaaatgcaaaaattagccaggcgtggttgcacatgcctttaatctcaactactgtggaggctgaggcaggagaatcacttgaacctgggaggcggaggttgtagtgggcggaggttgcagtgagctgagattgcgcctctgcactccagcctgtgtgacagagggacacttcgtcctaaaaggtgagaaaagagaggtgagtcatggaacaagggttttttgtttgatgaagcctaaaaagtatctgttgtcattggtgtttttggtgccttaggtgattgttgactgagaggagagcctttggttaatagaggaaaccactggccataattaaggggagaatgagaggaaaaagattatgagtttagaatacttgtttaagaatgttggcagtgaagggaaggagacaagtttttttttgttttttttgttttttttttttgagacaaggtcttgttctcttgccggtgctggattgcagtggtgcatggttcactataacctggacctcccaggctcaagtgatcctcccacctcagcctctggagtagctgggactacaggcacacaccaccacgactggctaattttttgtggggagagggttttgccatgtttcccaggctggtcttgaactttgagctcaagcaatccgcctgcctcggcctctcaaagtgttgggattacaggtgtgagccactgtgtctggcgggagggaggcattcttaagggtcaatttaaactagattcttactcagtgtttatgtaacaaaacattggacaggggaccagaacccttatctctctaaggttgtgtcctaaaatgtgatcatttcaccccttttggtataaaacattttagtagcttctagggtaaagactaagaccctactaatagtagggtgaccatataatttggcatccaaattgggatacttttgtgtatgaaagagggagctgttaataattatgcagtgacagctcgcataaatggaacttgtccttggcaatctgggacatatttgcccaggttatcctacctaaaagttctttccctacatgggctggtcccagtctgaccctccagcttcatctcataccacagttgaacttgtttactcctctttagccatgaaatcctttattcagtcccgtttactgtgatcctcttaaaatagggactttgcatttggagtttcctttgaattttttttttgaggacgagacttgctgtgtcttcttggctggagtgcagtggtgtgaccttggctcactgcaacctctgccttccagtttcaagtgattctcctgcctcagcctcctgagtagctgggactacaggcacctaccaacgagcccgactaattttttgtatttttagtagagatggggtttcaccgtgttggccaggttggtctcgatctcctgacctcatgatccacctgcctcggcctcccaaagtgctgggattacaggcgtgagccactgtgcccggcctaattttacatttttaatagagatgaggtttcttcatgttaggctggtcttgaactcccgacctcagatgatccgcccacctcagccttccaaagtgctgagattacagacatgagccactgagcccggccttattttattttatttttgagacagtcttgctctgttgcccagactggagagtagtgagtggtatgatctctgctcagtataacctccacctcccacgttcaagtgattcttgtgcttcagcctctccagtagcggggattacaggcgtgcaccaccaagccctgtgaatttttgtatttttagtagagaaggggttttgccatgttggccaggctggtctcgaactcctgacctcaggtgatctgcctgcctcggcctcccaaagtgctgggattacagatgtaagccaccacatctggtctgctgtgttatttttaatttgtgcagaatgcaggagttgtcagaagcaacatatgttatagcagaaatacttacatagtccccagcagaactcagtaatatactgtgattagttttttttgcctatcacaccttttgatcacctataaaaatagtactttttcccacttacttttttgtataattatatagagtctatgccagttgttagaacatcaaatcatttaggatcatttttaaattaattttacctcattaaataaagaattacctttgggtaccttgtgtttttctacagtctagttgtattgtataagcattgatagtttgggtatagaattctaggttgtaaatgctattttcttagacttttgaaggcatgttttggccgaggtgggtggatcacctgaggtcaggagttcgcaaccagcctggccaacatttgtactctactaaaagtacaaaaaattagccggtgtggtggtgggtgcctgtaatcccagctactcaggaggccgaggcaagggaattgcttgaacccgggaggtggaggttgcaatgagcccaggtcgcgccattgcactccagcctgagcgacaagagcgaaactctgtctcaataaataaataaataaacaaataaacaaataaataaataaaatgaagacgtgttctttagttttctagctttcattggctgcagaagtaatgatgagtgaaaaatttaaaagcttgtaggatcttcttttgatccagttctaaaatttcacagggatgttccttgttgtagatctcttttcatccattgtgttgatcatctgattgaattcttttggtcttgaaatttatgtccttcagttgttggaaattttcttgagattttctcctcttttattaccatatgagactcctagtattcaaatgttggatctcttacattgatcctttggttttcttcccttttttaaaaaatattttttctctactaagagatgttctcaattttgttttccaatttttgctattgtattttaaatttctaatagcttctttttattctgtctcttttttttaaagatagggtcttacccttgcccaggctggagtgcagtggcatgatcttggctcactacagcctcaacctcctaggctcaagtgatcctctcaccttagcctctggagtagttgggactactactggagtagttgggtgtgtgccactacacctagctaatttcttgatttttttcatagagacagggtcttactatgttgctggtctcaaactcctgagctcaagtggtccttctgcctcagcctcccaaagtgttgggattacaggtgtgaaccatcatgcctagccttttttattcccttgatgtctctttttttgtttttgagacagggtcttgctctgttgcccaggctggagtgcagtggtgcgatcttggctcactgcaacctctgcctccgtgttcaagtgattctcatgccccagcctcccaagcagctgggattacaggtgcccaccatgacaccgggctgattttcgtatttttagtagagacggggtttcaccatgttggtcaggctggtctcgaactcctgacctcaagtgatccacctatcgctgccttccaaagtgctgggtttacaggtgtgagccactgtacccagcctattctcttcttgatagctctatagcattgtttttgtctaaatttgatggatttggttcctttttttttttttttttggagacagagtcttactctgtcacccagactggagtacagcggcatgatcccagctcactgcaacctccgcctcctgtgtttaagtgattctcctgcctcagcctcccgagtaactgggattacagacacgtgccattacgcctggctaacttttgtatttttagtagagatgggattttgccatgttgaccaggctcgtcttaaactcctgacctcaggtgattcgcctgcctcccaaagtgctgggattataggcgtgagccactgtgcctggtgtgtttggtactttctcttatctttgcagaagtcttcattgtccttcatagtccctctttgctaagttaatttctttttctgtttaggtctttgtgtcatcactcagtgcagggaacagaaagcactagggattttttttttttttttttttttttttgagatagagtttcactcttgttgcccaggctggagtgcagtggcgcgatcgcggctcaccgcaacctccgcctcccaggttcaagcgtttctcctgcctcagcctccctagtagctgggattacaggcatgtgccaccacgcctggctaattttgtatttttagtagagacggggtttctccatgctggtcaggctggtctcaaactcccgacctcaggtgatccacccgcctcggcctcccaaagtgctgagattacaggcatgagccaccgcgcccggcagcactagggattttaagcagaaagggaaacaatatgagatgtaggtgcttagaaatgatttttagagaggctagaggagcaataatgatgcttagaacattgttgtagaactgaccttctttgggagcttttatgtgtgaggccaccaatggaaccagtaaactgttttaaaaacagtatatagctactattcaggactaggaagctgccactgctattgctttaggaatagctgcctcataacacccagcaaactggagaatggacattggaacactgtttcagaaatattttacacccaggtcagtgcctagcacattgtagatgagtgacaaaggtagtagttattggtttttctttttctttttaaatgaatcagtcatttaaattaagacttaatctgtacgagtctgctccatactcctgtgcctgtttatgttacagtgatttttttttttgtttcaaagaagtggttttgtggtccagtttcaatctcatttagtatttttcctaattttacccgagtttcaactagagtttgcctgagtctgattaggttgttgctaattctttgacagattagtttattcagtgagtagcagaattttattggcaccggaaactatcctttgtaactttgagtttatgcaaaagcatcttcttagtctttttgcatatgccagaggagacccttgttaatagaaattgtgatcacaaggccgggcatggtggctcacgcctgtaatcccagcactttgggaggccgaggcaggtggatctcctgaggtcaggggttcgagaccagcctggccaacatggtgaaaccccatctctactaaaaataccaaaaattagccgaatgtagtgtcgggcgcctgtaatcctagctactcaggaggctgagacaggagaatcacttaaacccggaaggcggaggttgcagttagctgagattgcgccattgcactctggcctgggcaacaagagtgaaactccatctccaaaaagaaagaaagaaagaaagaaagaaattgtgatcataagaccttctagagtttttgtgtaatttttttttttgagatggaatctcgctttgttgcccaggctggagtgcaatggagtgatcttgactcactgctacctccatctcctgggttcaagcgattctcctgcctcagcctcttgagtagctgggattacaggcatgagccaccacgcccagccaacttttgtatttttgtatttcaccatgttgaccagtctggtctctaactcctgacctcaggtgatctgcctgcctcggccccctatagtactgggattacaggagtgaaccaccgtgcctggccgagtttttgtgtattaagttatatttgttttaatttcggggaagttcattaattttcctttggaaaaatactgtggatcacatcctttttccctttggaagggaagttaacatgaggacagtgttgaagctgatgagtggctgttggagcaaatgcatgcttgataagcagtttgagcctgttacgaaataaaattatctagttttaggacaaggtttttatgtgggtatattttactttaaattgaaaataaggtttattttttctctaaaggtctggagcatggctagatataagagacatggcatgttgatgctgagctctgggtgtgaagagatccccagacacggatttgtgtgatagtcacttgagtactgcactagtgttgagtggtgttcaggggctaccagacagctgttcagaagaaccttacagtatatgaaagcaggaacagagcttagccagctaggcctaattggcctggctctgtatgtacagtgggtctgttttaagggatttaaaaatccttgttttgtggctttgattagaaataagaattttgtatagaatgatttctgttagctgattacaggtgaaaaactaaatggcttttctctttcatctcctgtaatatatttgtttttctaaataagaatgggcctgaggtgaaatgttagggataggtactgacacaaactgaccaagagaatgttaacaggtgggcaataatttgccgttaccaaattaattaaaactattttgtaatgagcttcagattatgttgtatttgtccctgcaagtttacttattgatttgtttcacactaattctttgttccctgtttaagtggacaatcttattttttcaagtgtttatggttggaatatgctaactaattccttttcctttttttttttttttaaataaggatcttgctctgttgcccagagcgacagtggctggagtgccgtggcatgaccacagctcactgcagccttaacctccctggcccaagcaatcctcccatctcagtctctctagtagctgggactacaggcacaggccactactcccagctaatttttgtattctttgtagaaatggggtttcaccatgttgcccagggtggtctcgaactcctgggctcaagcattctgcccattttggcctcccaaagtgctaggattacaggcatgaaccaccgggcctggcctcctaattcattttcaagtagttattgttattgcaggcctggaatgactttctgcatgttatgtatgtggtatgacttttggaagaatgtaccctaaagttatcacctagtaatgatatatttctctaagagttccattgagggttcattttccagcgattctgtgattggatgtggtttttttgtttgttcatttgtttgttttagatggagccttgctctgtcgcccaggctggagtgcaatggtgcaatcttggctcacagcaacctctgcccccccgggttcaagcgattctcctgcctcagcctcccgagtagctgggattacaggcatgcacaaccacacctggctaatttttttgtatttgttagttagacggggcttcaccatgttggatcaggctggtctcaaactcttgacctcatgatccgccttccttggcctcccaaagtgctgggattacaggcgtgagccactgcgcctggcccaggatgcttttttttttttttttgagacggagtttcactcttgttgcccaggtgggagtgcaatggtgcgatcttggctcactgcaacctccgcctcccaggttcaagcaattctcctgcctcagcctcccaagtagctgagattacaggcatgcaccactacgcccggccaattttgtatttttagtagagacagggtttctctgtgttgaggctggtctcgagctcttgacctcaggtgatccgccagccttagcctcccaaagtgctgggattataggtgtgagctaccgtgcccggccctggatgcattttttaatctcctttttttgccttgccctgtcttcttatggtgctgactgatctctactttctgactggtaggactagtctggagtagggtacacctagacaaatgaaggacacccagggagtgagagagagtcatcctcacagaaggactagtgcagaggccaagcaaagttcagacactaagttccagaaccaagtagttcaatgcagaagccagggttggaaatgaccttaaaacaagtcaaggtcaaactggcggcatgttgaacaaccagcatgattaaagcagcagagtatatggtattgctggtggtagaaggtgcttaggagcattttagaaagtgttaaccaactggatttagattagttctataggcctcaggagaggataggcatgtgtcccagatacatggtactaggttttattgggaaagtacaaccatagtaaagctgtgtatgttagtcttaagtcactgctgtagaatgttagcaggaatataaatatatcctttctagctaattttctttttctttttcttttttctttcttttttttttttttttttttgagatagagcttcgctctttgacccagttggagtgcagtggcacgatctcagctcactgcaacctccacacccccagattcaagcgattctcctgcctcagcctcccgagtagctgggattataggcatggaccaccatgtccggctaatttttgtatttttagcagagatggggtttcgccatgttggccaggctggtcttgaactcctggcctcatatgatccacccgctgcagcctcccaaagtgctgggattacaagagtgagccactgcacccagcctggctaattttctttttaatggccagatacttgattacacctggttacttgttagaccaataaaattcaagcttacttgaaatgaaagctaatttggtttattaagggaggaaattcttaattagcatagaatgccagttacatttataaaactttatttttttctggttgcagttagagtttggttcttctgtaaaacatctaaagcaaatgggtatgttttgtgacttattttcaggagcgtgtatatttctagtattagattcacatgttgaatttaacataggaagatctccttatctggaatataaatagtttaatcaggcaggtggataacacaacaaatccagtcaggaaatggactcaaagtaaatgtatactaatatcttaagtgttagatagcttctagtaatttaggattcctatctaaattgctctgtgtttggaggcattgtcagatgtcattctgtgcttaggtgatagctgcagcaagtccatgtatgtatgttttaggatatcagttctacaggtttctgcactttgactatgtgctgataattacacttggactttctacattatattgatgaatgaaaaataatatggttagaaaattatgacaagaatatgttcagaatattaactcactgcatggctccccatgtatccttgacaactcatgtgacatagaagactcattgatttggctgagtgcagtggctcatgctggtaatcgcagcacttcgggaggctgaggcggacaggtcacttgagcccaggagtttgaaaccagccggggcaacataggaaaaccctgtcttcccatctgccccagcaaaatacagaaattagccgggcgtagtggcacatgtgtatactcccagcttcttgggggactgagatgggaggattgtttgaacccaggaggtgtaagttacagtcagccatgatcgtggaggattgcttgaacccaggaggtagaggttgcagtgagccgtgattgtgccactgcactccagtctgggcaacagagcgagaccgtctcaaaacaaacaaacaaacaaacaaacaaacaaacaagctgggcgcggtggctcaccgagcctgtaatcccagcactttgggaggccaaggcggttggatcacgaggtcagtagttgaccatcctggccaacacggtgaaaccccgtctctactaaaaatacaaaaaaattagctgggcatggtggcgggtgcctgtagtcccagttactcgggaggctgaggcaggtgaatggcgtgaacccaggaggcggagcttgcagtgagccgagatcgcgctactgcactccagcctgggccacagagcgagactctgtctcaaaacaaacaaacaaacaaaaaaactccaactcattgatttattgctattgtctgatggagacatgggtgtaaccttaagaattttttttcatgattcattcagcctgggaaattggtaggaagaaagagaggatacccatgcatgtgagttttagagattatagaagcatcagttattatttttttcttcttggaagagacatgatattttacataggatgaaaaaagagaagttgtgtgtgtctgtgtgtgtgattttttttccttcctggaaaacacatgatacattttacataggatgaaaaaagagaagtgtgtgtgtgtgtgtgtgtgtgcgtgtgcttgtaacatttagcaaaatagtcattatctgagttttctgtgcagaagatgtaggaataataagtcatgggccttgccctcaaagggtttacagtctcttgaggtagctaagcatatccacaaatacagggatttgtatgatcaatgcactgtaagtgctgtatatgcaagaggaagagatagtagtcagttcttctctctttattagccacttcatgatgcattgactttttttttttttttttgagacggagtctcgctgtcgcccaggctggagtgcagtggcgcaatctcggctcactgcaggctccgccccctggggttcacgccattctcctgcctcagcctcccgagtagctgggactacaggcgcccgccacctcgcccggctaattttttgtatttttagtagagacggggtttcaccgtgttagccaggatggtctcgatctcctgacctcgtgatccgcctgcctcccaaactgctgggattacaggcgtgagccaccgcgcccggccgcgatgcattgactttttcactgttaatattgtggcctaaggaggaagaggaaaaatatatgaacacagaacaatttgtttgtggagttaaagggctcacaaggtaaggacagctgtaagaactgtctgccctgagctcccagtgcaggtagccccacaagtcccttttcatcattttacttcagcatctgcaagataagtctttatgctacctagacagctacacacctaagtgtggtgacatggcctagtgcctgaccctgagcagtaaaggtactgagggtccagaagaaggaagggaatactaaaaacgcacttagttgggaccctgtcttatttatttatctttctcttcctggtagtacatagtagatactcagtaatgtctgctggattaggtaaatatgtctcaaaactagggacctggactgagcctttccgcaccgtctcgaaactctcctgtgtacctgtgcataagagtgcatataaatgccactgtacatttgtgtgggttagaaaaagcaaaagtgtgttcataacctcttatgagaagagactataaattactttgcaccaagggcggtagctgactcttgagttctcttcagtgcctggtacaatgcctgctgcccacctgcttgtgaaggctgtggtggcttgtacaggcactgcagggcagatctagattgactatttgggtctcagaataacctgggtcctctgtaacagaggctgagtacttatcttttcatgagttgttatattaaagtaaaattgtaagcactgctttcctgtggcttgcttctttcattttttaacagaaattttattgagtatccccaccctataccagacattgccaggcactgaggatctgaaggtaatctcattttacccacattccagtgtaggagacagacatggaatcttaaattttaaaaagatgtatataccatgcaccatatgagaatgatgcaccaagtgctgtggagcccagaaaggtacatgatttttttctgctaggagaggtaaagcagggaagcattacagaggaaggatgacatttgttccatccttggtcttagtttccaatggcagttggttaggaattagatggagttaggaatgggaatagatggcatggagtgggggagagtgaagtccgaggctcagaaggtctttaggacttagacctgaagggctttctagggggactgccatgccaaggagcttgcatatttcttggtggtcagaagttttcaaactgttttgcagaaaactaggactgttgggatggggcttgatgggacactggaccctacactgtatcttctttttttttttttttttttttttttgagacggagtttcactcttgttgcccaggctggagtgcaatggcacaatcttggctcaccgcaacctctgcctcccgggttcaagcgattctcccgcctcagcctcctgagtagctgggattacaagcatgtgccatcacgcctggctaattttgtatttttagtagagactgggtttctccatgttggtcaggctggtcttgacctcccaacctcaggtgatccgcttgcctcggcctcccaaagtgctgggattacaagtgtgagccattgcagccagactatatatatatatatatatatatatatataattttttttttttttttttggtggtagggtctcactctctcaccaaggctggagtgcagtggcacgatcagggctcactgcagcctcgacctcctgggatcaagtgattctcccgcctcagcccctctagtagctgggactacaggcatgtgccaccacgcctggctaattttttttatttttagtagagatggggtctcaccgtgttgcccaggctagtctcccttccaaagtgctgggattatagacgtgagccaccgcacttggccaagaagtaatttataacagaacaatttatattttcatagaacagtgttttatgtgactaagaacttgacataaaatgaacagtagaagcattagtcatgattgaaattaaagctcctataaaatttccactggtatcattgggtggccctcagggtaccacaagtaaatactctcttcatcccctgtcctccttatcttctttggtttttatttttatggaagaaatcaccatattctagtcatctggatgtactgccttgggttaatttttggcttcttgtgttttctacactccacaagatgttgaacacagtatctttcacttggtagtatgacatcttgagttttgagctatttgcatgtattacttattaaatctgtgaagtcaaataaacaagaacaatactgcataaaatatgccgattttacaggttgttccatacaataacttgtaaagttgacatgctgttttatgcagtatcattcttgctggaccattttggtccctggaaggcacaggtcattctcctgccatgaggcaggatcacattgagaagtaccacattatgacctgagctttaaaaattactgtttgtaattgttaagtaattaattttgagtcagtagcttttgtaagtattgtgtaatactgcatttaaaatatggttttattttcagtcatatgtcttatgacatgtatcctagcccttctggtagttttatagtggggcaaaatagagactccttcacaagtgtcagttcattcctgtggagacccagcacttgtgtgaactaggcattttggttgtaaattattacagtatgggattttttttaacagttaattttttcctcttctggactagtcttcagttaaagcctgccatcgtgtggtgttttaaagcatgagatttaagcatgtggcatgactgctgagcttttatgatgagtaaaaagtgaatactattaaatcttttcatatgtgatcaacatttggccagtttatttcttcactttattttaatattacaatattattttgaaatttttattaattaaagattcctcctttagccagtcctcaaacatcagtaagtaaaagtactcttttacttttttagtttatttttaagatcctgtttctccaagaaaaatacaatagcagttttaagaacaggtattaataattttgatgttattattattttttgagacggagtctcactctgtcacccaggctggagtgcagtggtatgatctcggctcactgcaacctctacctcccgggttcaggcaattctcctgcctcagcctcccaggtagctgggattacaggcacaccccaccatgccctgctaatttttgtattttttatagagacagggcttcattttggccaggcttgcctcaaactcctgacctcaggtgatccacttgcctcggcctcccaaaatgctgggattacaggcatggcccaccatgcccggcaataattttggtattattaaggcttctctgtgtaactactgttaataattatttggatgagagaaatactgacctttaaaatataattattgggcaaaatatatccaaatgaactataattttataatgtagaactccatttaaaaaaaagtggttatttagaggccgggtgcagcagctcatgcctgtaatcccagcatcttgggaagctgaggctggcagatcacttgaggccaggtgttcgagaccagcctggccaaaataggcaaaccctatctctactacaaatacaaaaaattatctcggcctagtaccgcatgcctgtaatcccagctacttgggaggctgaggcatgagaaccacttgaaaccaggaggcagaggttgcaatgagccgagatcgccccactgcgctccagcctaggtgatggtgagatgccatctcaaaaaaaaaaaaaagtgatatttagagaaaaagaaacttcagtttgaacctcagcttgttttttgtttttgttgtttttgagacggagtttcactcttgttgcccaggctggagtgcaatggcacaatctcggctcactgcaacctctgcctcctgggttcaagtgattctccttcctcagccccctgagtagctgggattacaggcatgcgcctccatgcctggataatttttttgtatttttagtagagacggggtttctccatgttggtcaggcaggtcttgaactcccaacatcaggtgatccgcccacctcagcctcccagagtgctgggattacaggcatgagccaccacgcccggcctgtttgtttgtttttttgatacaaggtctctctctgtcacccaggctggagtgcagtggtgcggtctcggctcactgcaacctccacctcctgagttcaagtgattctcctgcctgagcctctcgagtaggtgggactacaggcattgcgccaccatgcccagcttaagtttttgtattttttggtaaagacgaggttttaccatgttggcaaggctggtctcgaactcctgacctcaagtgatccgccagccttggccttccaaagtgctgggattacaggcatgagccaccgtgcccggccctgaacctcagttttttggtagttggttttataaactgaaataatttttatgcaaaatattagggaggccgttatttattgttacctctatgtaacaaaatgggaggtacttgcaagcttggggtcaattagttcttactaatatcaggggagtttcagtatcatgcattgggttataacattactttttaaaataaccttttcttctcatttagtgtaatttgattttctttttttttttgagactgggtcttggtctactgcccagctgcagtacagttgtgcagtcatggctcactgcagcctcaacctcctgggctcaagcgatgtccccgcctaagcctcccaagtagctgggactacaaatgtgtgccactgtgccaggctcttttttttttttttttttttgtagatttggggtcttgctatgttgcctaggttggtcttgaattcctggtctcaagtgatcctcccacatcagcctctcaaagtgatgtgattacagacgtaagccactgcgctcagcatgatatcctgacttacagttcctgtatgttttggcttataatatgcattatatttaaaaaatgaattttcatttcttcaaaaatatcctgtgttagtgtgcctctttatagaacaagggggacatgcagtctcactcaaggacaagcaggattctggtacattggtctttaatatggacgtctttgacccatagttattagtaatcatgtgacattgaaagagaatgttagccaacaaaaactctagatccagtgcttgtgaattgcttctctaattttgataggtgatgggagcctttatttaaactacttcttttgtttgtcccttcagcagagagggagaagacctcaagtcatcagtatggtttgatgtcttatgctttttaaatctgttccagctatgctaagaaggaatctgatcttaatggcgcccagatcaagcttcgagaatatgaagcagcactgaattcgaaagatgcagctcttgctactgcacttggtgacaaaaaaagtttagagggagatttggaggatctgaaggatcagattgcccaggtaaggtcaagcctactcttgagccgtatgtgacaggttaattgcctcatctgccttaagccatagtttgattgattgattgattttcaaatgtattttatttttgaaattttatatatttgttttctgatggtttacttgaagaaaagtcttgaggtagctaacatgcaaaacattatcacctcccaggcattatatctggattggccagatcttgtggttcccttcttcttccctattgtgcacacactcattctgtctctgctctcaaagcctattttgttagttaggaaataagtaagaaaagagatgccaaaatgctgctctccacacaggaaaaaatgaaagtggttagctaaaataactagtttgatttttgaaatgtgagtgagtcatacgtctctgttctattccctgttgccaattaacaatttgactggtcgtttggtatgatactctgtgggtgggaccagcaaatgaatacccagttctgtgataaatgttaagatgaagtaattatacattgataaatatataggaattttaacacttgatttgatttgattcatagatatcttatgttcattattaaatgattgccatgtaatttttatcacaattctttttccttgtaatagttggaagcctccttagctgcagccaaaaaacagttagcagatgaaactttacttaaagtagatttggagaatcgttgtcagagccttactgaggacttggagtttcgcaaaagcatgtatgaagaggtaactatatataattttgctttgtaaaggaatggaggggttctagaatgactttgtcatagctaaacatgtaattatattttatttatgatttctttgccacaaaaatatatcagataaagaaataataaggtttggggatggggagaaattttgcaggtagattattcaagctactgctgctaaaagaccgcatttgagaactcaagctgttaccgtaaacagatatgatttcacttcatcttacttatttttgtttttttgtttttgtttttttgagacggagtcttgctctgccgccaggctggagtacagtggcacgatctcggctcctttcaacctctgcctcctgggttcaagcagttctcctgcctcagcctcccgagtagctggaactacaggcgtgcgccaccacgcccagctaatttttgtattcttagtagagacgggatttcaccatattggccagggtggtctcgatctcctgacctcgtgatccgcccaccttggcctcccaaagtgctgggattacaggtgtgagccaccacatccggcctcacttcatcttaacttataaaggcttggtcacagcagctaattactgtcaacatgtttaagcattagttatctattcctgcctaacaaattacttccaaagttcatcaacctaaaaccacagacttgtattaatttcttagttcctgaaggtcagaattcagagctgctaaactgggtggttctgtttcttggtcccatgaggttgcagtacagcttttaacctgggctggaggaatggcatctgagctctttcacagggctgtgggcaggacgtgtcagttcctcacctcatggtcttcttcatagggctgctcatgatatggcccccctaagggtcagtgatgagaaagagagagagagagagaaagaaacacaacgagaacatgaatacatgctaccagctaccaaggcagaagccagattgtcttctataacctaatcacagaggttacataccatcactttggccttctcctatggctcacatctggaaatgcggctactcacagcatttataggcgtgtaaatttttttttttttgagacacgagacccgctctgtcgcccaggctggaatgcagtggcatgatcttggctcactgcaacctctgcctcctgggttcaagctattctcctgccttagcccccctagtagctgggactacaggcgcatgcacccacgccctgctaattttttgtatttttaatagagacgaggttccaccgtgttagccaggatggtctcaatctcctgaccttgtgattggcccgcctcagcctcccaaagtgctgggattacaggcgtgagccaccgtgcccggctcactcatgtggaaatcttaaaatatcacttataagccttaactgctgtggtcaaggggcaggggcaaaaccgttgtcaaacaaaggaagtaataaaattgaggaaaggggaatgtatatttcatgaaaattgtagagggttgaaatcaactcatgggggagaacatgctgttaatgtgctaggcttaatgtttttagaagtagtgtaattttgaaaacagtgcaaataggaattcattgtagcagttagcaaaccagttttttagttggaggaaaaataatagaaatctgattattttttaaaattacaggctttaaacaaaatagatattagtgcaaggtgcaccagacaagcagtcagaccttggacaactcttagtgtcagtttcttatttaaaatgaaatactaatactgctatttttttcttcaatgagtggtaaggatcaaagtggaatactgtgtgtgaaaactctttggatactgtagcaagtgctgtcatataattgttactaagtgttgctttgttaaagcagatattttgatatgaggttgacttacatttttgttttgttttgtaaaaattgtgatttatcattacttatttctgatgttgtgtgtagacaaccaggagtagggttttttttctttgtaaggtcactggttctatataaaaaatagcatcagtaaaaagtaatttaatatttttagagtgcatagcatctttgaatttttggcctttgcctttttgagaatggatgttaagatagtcctcttcagttttgtttttgtttttgttttttttaactctttttggagacagagtcctgctctctcgcccaggctggagtgcagtagtacgatcttggctcactgcaacctccacctcctgggttcaagcgattcttctgcttcagcctctggagtaactgggtctacaggcatgtgccaccatgcccggctaagttttgtatttttagtagagacagggtttcaccacattggccaggctggtctcgaactcctgaactcaagtgctccatctgcctcggcctcccaaagtgctgggattatagttgtgagccaccgcacctggccttttttactttaaaaaaaatttttttgtgtgagacagagtctcactctgttgcccaggctggtgtgcagtggtacggtcttggctcactgcaacctgtgcctcctggattcaaatgattcttgtgcctcagcctcacgagtagctgggattacaggttcacaccctcacaactggctaactttttttttttttccttactttttactaagtaataccatgttggccaggctggtctaaaactcctggcctcaggtgagccactcgcctcagcctcccaaagtgctgggattacaggtgtgagccactacgctggccttaactttttttttttacattcatgatatatattcagtaataatatctaacttccttattatgaacagttgggggaaaaaaggaaggagaaagacgaaagaggaaggaggaggtagacaaagaacaaaccattagcagtcactcttcagtatttttgtgatttaggtattatttgcttcatgaaatagatgtgatctctgggaaggtgatagcagaatcctcctgatttttctgatttttcagattttgtcaagtgcatgctcctgtgtagtagttaagagaaagatgaagaaatgcaaaggaaaatacatgcgctaatatacacaaacagcaactttggtgggttatacttccctcttgtggcttcttcagatattaccattctaattattatttttttttttttgagacggagtccagctcagctgcccaggctggaatgcagtggtgcgatcttggctcactgcaaccaccgtctcccaggttcaagtgattctcccatctcagcctcctgagtagctgggattacaggcaccctccatcatggctgactaatttttgtattttagtagagacagggttttaccatattggccaggctggtcttgaactcctcacctcaggtgatctgattgccttggcctcccaaagtgctaggattacaggcgtgagccaccgcgcccagccttccattctaattttatttagacacttccttaaaacagagtaaaggaaaggatcatgacaactacttctattcttcaatggtaaatttttcataaatatttgagttagtcaactaatattgttaataagatcctgtgtcacttgataatgatagcttaataccggcttttaaagaagtcatgtaaattagcttgtgctgcctattattatgtctaagaaaatggttttatggctgggcaaggtggttcacacctgtaatcccagcaacttgagtggctgaggcagatggatcacctgaggtcaggagtttgagaccagtctggccaacatggggaaatctcatctctactaaaaatacaaaaattagctgggcatggtggtatgtgcctgtaatcccagttactagggaggctgatgcaggagaattgcttgaacccgggaggcggaggttgtagtgagctgagatcataccattgcacaacagcctgggcgacagagtgatactctatctcagaaaagaaaagaaaagaaaagaaaatagtttcatttcacataaatctttacatgaatttatcacaactgttaagtttaactttccatgtgctgttttttcagagatgttcttaagattatcaatgaaacaattcagaaaaataatttttgcttagtgtttagtatagtatactgtgtataaatccttgattgcagatagttttagtaggccatccaggcctttccttggcttcagaaaaataaatagctatgctcctgaaaaggaatagaaagttcctaaggcttgagatgctaccacttctgtcattagttccatttcaaaaacctcaactgaaaactaagaggcaaaaaagtgtttattcacatgaccgcctgaggacaaacaggaggaagttcgtgtgtaaaacttcagatggctgtgatgtcactcagatgtgtaccaatgcagccatggtaagtagcttggctttatgctttttgttttttccccaggagattaacgagaccagaaggaagcatgaaacgcgcttggtagaggtggattctgggcgtcaaattgagtatgagtacaagctggcgcaagcccttcatgagatgagagagcaacatgatgcccaagtgaggctgtataaggaggagctggagcagacttaccatgccaaagtgagctctcttcagaagattcttttgaacacttaaaatcattacttcacaattcccatgatgaacatggctttatgtttattttgttctagtttttaaaaatgattcccctagtctccatgaaatatatagaaaattgattttttcaaaaaagtgcagttttctataaactaaatgttattaaaaattactagaagaatgtagggttgttgcaattttattagaggttaggttttgtctttttgtcccattgatcattcgtactatgccatagtagttgaacccaaaccatgtgaaataactttcttccaataacaagtactgatcatgctgtcctacataaacatccatttagtaatgaatgaatgtcagactgcattagatctcactttcatgtcatcattgtgcatagattgtgactaccacacttccggcttttttgcataagggccaaatggaaagtctctgctatttcttcttctgtcactattattcacttaaaaaaatattgtagaaacttcccacttatattagctgaccttacaagaattcataaaaatcaccaactagtacaggctttccctggtaaatgattttgccttgtgttttaaatgttacatgatttgattaaaaagacttttttgtggttgacttagaatattagagtcacagagttattgaaaattttcattgcatggctttaaactgttcatgttgctttttatctattgtatgaagtagcagttagtgaaagtgaaagatcttattataagcagtaacttcagttgtataacatttatctaatatcacacattgagctatacagtgaaggagctaaagtaaggatccgtcacagactgtggcctcacagggagccagggaggagacacaggagcatgtccctgagacacacatacacaatagtgttatgggatttgtattttactcaaggagttttttttgcttctgaaaggaagtgtttctatctggtttgaacgaatctataaactagtattttctgcttgttggtttacattctgtattggatttggtgggttagggatatgtgatgtttcttttcttacagacaccaccacagtcaagttgctattgcccagtcttcttattatcagtgttatcttagacattaaaggtttaatagatgaaatattgaagtaataagctttgggtaaaggcctaggtatattagcattcttaaagctcattatttaggaagtgactctaaaagtcacacagaattaccatcattcacaccatatcagcaaacttcatgatgcttttcctgtgtttcatctaccagttaccagcaggacttaggtttgaaatgccttgaggtgaatcatgcttccttttttgtttcagttctagataagactgactatgctttgcttcttcttttagcttgagaatgccagactgtcatcagagatgaatacttctactgtcaacagtgccagggaagaactgatggaaagccgcatgagaattgagagcctttcatcccagctttctaatctacagaaagaggtaaataatcatctttctgtaagaagttagacttgaaggctaccttcaccacgggcacctacctgctttgcttgggctgatgtcactcctccctctgtttgttacagaggatggtgtcatcctgtgctttcgtcttcacagtacttttctagattcgttcattttgcattgcataaacatcctgtgagcagatactattgttcctaattagtagattacacagagctaagggacttgcccttgaggaaggagcctgctagtttattcactgtacttaccctaggacccggatcttccgacctgtctaacagcttcatctctacagagttattctcaacaccttccttttttatatcatttgaaaaccaaaatgaagaaaaacatgcaaaaattctttgtgggtggtgaatgctttgtgtttctagacaaattctttagtgcttaaagtatataacaattaggatccaggaaagtagctttaatttgcatattccgataagaatttagtgactcattcattcgttggtacgcctaagtgacaaatggcattattgccggctgtgttgactggctgcctatcagggtgtgatggtgtgcttcaggtgctgcttaagcaggcatggacactacttcagatcagttttagcctagggtgatgtcagtgtggacacaaagtacatatactccatatactgcattcagaatgattcagcaattaactcgtcaccttaattattttggaaataacttccgcttctattttcctcaagggaggaaatcttgttttgaattttccacatgagaataaactttattttacttttttttttttttttttttttttctttttgagatggagtctcactctgtcgcccaggctggagtgcagtggtacgatctcggctcactgtgagctccgcctcccgggttcacgccattctcctgcctcagcctcccaagtagctgggactacaagtgcgtgccaccacgcccggctaatttttgtatttttagtagagacggggtttcaccgtgttagccaggatggtctcgatctcctgacctcatgatccacccgcctcggcttcccagagtgctgggattacaggcgtgagccaccgtgcccagcctattttactcttgattgggcttttcttccttcctttttctttttaccatttttagtaaaatatttttctaattataaaactgatgacctctgttgcaggaacttagaaataaagcagaaaatgagtcccataaaatggggtgatataaaataatttagttaacacaggggcttttacactgtctatcatgtgctttgttacttacggcacaaatttttaaattattttaaacctattttgtgctgatagtgttttgaagattttcatttaatagcagagctggaagcacctctgagttcattccatgtaaccacagatctaggtgagtttaatgatttgcccgttgcccagaggctgcagactgataaatgggtttctctactccttcccagtttttccttttataactcattttcttcaaagaagatttacttttagaaatttaacagataatctttttttccattgcaccatctgtcttagtccttttgggctgctataacaaactactattgacttggtagcttataaacaacagatatgtcagaaattatttctcacagttttggaggctgggaagtccaagatcaaggcactggcagattggatatctgcctggtgagggctgttccccgatttatagatggtgccttcttgctgtgtcctcacatggttaaagggtgaatgagcacccttggccctatattataagggcatgaatcccattcactagggctttcctctcatgatctaattaccactcaaaggccctacctcttaatatcatcaccttgagggttaggatttaaacatgaaatttgtgggaacacaaacacacagactgtatcactgtctttgtttttcttgttgtttttttttcttctgagacagaatttcgttcttgttgcccaggctgtagtgcaatggcgcaatctcggctcactgcaacctccgcctcccaggtttaagcaattcccctgccttagcttccctagtagctgggattaccggcatgcaccaccacaccctgctaattttgtatttttggtagagacagggtttctccatgttggtcaggccggtcttgaactcctgaccttaggtgatccgcccgcctcagcctcccaaagtgttgggattataggcgtgagccactgcacctggcctatatcaactgtcttaacaggtacttttccaaaaatgggcctctctgttcttgtactgagttggcatttactactcttttccatttactaatagtaagttgtctactagttactgtctatccctcaattttattttttcctactgtattattatttttttggctgctgcctaatccatttgatttacttagtacagatcttctcttgaggttgatcttcactgtgctttggatgaggagactgttattaataagtagtagtgggctctgaaacttagtagctatgtgttctaacctaggttcaaggctgtttccctgttaattgaattcccatttttgcaagttggtttttttttttttttgagacagaattttgcttttgttgcccaagctggagtgcaatggcactatctcagctcactgcaacttctgcttcccaggttcaagtgattctcctgcctcagcctcctgagtagctgggattacaggcacgcgctaccacgcccagctaattctttgtatttttagtagaaatggggtgcaccatgttagccaggttggtttcaaactcctgacttcaggtactctgcctaccttggcctcccaaaatggaagggattacaggcgtgagctgctgccttaaatgctgggattacaggtgtaagccactgtgcctggctgcaagttttttttgttaaccttatcttagtggtttttaagtaatgttaggcagtgcactgggggtttccaggagctaactccttagcagataggagacgagcaatccctttagccaaaatagtttttaatttctctggggtgaatctttcctctgttcattattggtaacagactttatggtaaacagtatattttgaggaatatttttattagttgataaattttagccttagaaaaatcatcaaaaataaaaatgttatctttttgaatattttcctattgtttgtcttaatagtgtttgttgctgagtcatatcagtttcatcatgctgcctattaggccataagaatttccttttggttaaataactcaggttagtgaagtacttcttaaattttacttaaaattgacatggctttaaaatactggttttacaagatatatttaaataatatatagatggtagcagtgttatgttttggaattagaaattttacattgcttatagcatctctagatttttgacttgggaccaaatgaattggttggttagagtctgcttgccttagagaagagtacagtatggtacttaaaaacacctctaacttttgtttttctaacacccagattctggagactttggttgcagctagaccttaataaaccagtacaattacattacatactataaaatatttaaaaaccccaagatcatcagaagtcataaaatttagggttagtggcaagatctgagagatcatctagatagttagagctcttcattttccttatgtggaaactggtttagtgagattagttacagcttgcttatagcctcataggtagtttcaatggcagaattagaaaggagaatctaggtctaacttctcatactgtgttccttatatttcactacacaggtgtaagtgcagctactgaaaatagaatttaaatatttctatttaaaatacagaatgattcagagtaactttaaaatttttatacctagattttgatttttccctcttaaagagctctacaacatcaaaggcagtcaaacagagacatcattgggtttataaatctcggctcaggttatctgtgaatcttgggtagtttatatctctcatcaactctcctttagattctacctttttgcccattcaaatatatcttctacctctgatatatgaaataaagggaggcattttgaacttacatgactttttttttttcttttggagaaaaagaaaatacaaggaacatggtagcggggaaatggatttctccatttatagcatgatttttgcaaacgcagttaaatgcaagttctctgaggttcagggactacctttgtaatatccatcttaagaggagtgcctgtctaaatagcatgtcaagtcatatactactctggaatttaattaattgattggtcaattttttttctttaaaaatatatttttgtgtgtgcgtgtgaaccaggcaccccctctgcccccaaataggtttacagtgactcttgattattttttaaataaccttgttattttggcataattttagatttacagaaaagttggcaaagtactatagacagttcttgttttcctctcacccattttcccctgttgttagcatcttatgttaccatagtatatttgtcaaaactaagaaactgacattggtatattactgtgaactcgtctccagactatttggatttcaccagttcttctgttatcttctttctgttccaggtgccacatgcctcccctggtctgtgacagtttcttgggctttccttgttttttatgagcttgagtcttgagtaagattgtccaggtatcctgtagactgtcccccaatttggatttgtccggtgcttttcacgtgattagactggggttttgggttttaagtgcccgttttgtcacatcgtatcagggattgcacgtatgtgataaccacatgacatcactggtggtgtttggtttaagatagtgtttgtcaggtttctccactgtcaacagcgctactatttttccgttcccatacactgttcatggaaaacagctcactaagtccagcctaccctcaagggtgaaggacagggcaggacttaagcgccacattctggagggaaatctacatttattaaatggcattcttctgtaacgatttatccattccccgtttgtttggtttgtttgtttgtttgtttgtgtccgtatggaccatgggcatttactttatactttgggttgtaagctaatactgcagtatttacttttttggcttaaattgtttcatatttggccactgggagttctgtcagcttggccactatgtcccattgttttttgagcactttgttgctttctggtactataacatgctctaggctcatcttgcattttccctgccccagtcctagaattatccagtctccaaggagccctggttcttgttattggagaatggtatatagaaattaagatctgggcactgagtgtgctcactggtactgggtatcactgcttcttggccctctcaccgataaaagtgggtaacattttatgtatgctaacccatgtgtatgcacatatttataactttttctgtctaatcatttgtgttaagataaacatgaattcatacagatgtctctgacttgaatctagtaggacagcattcaattttggcttcctttctgacatacctgtatcttttctctctcagagtgagaaacctggtttttatcatccatttacttatctgttcagccccagtatatgttaaagcagtttcaaaattttgaacctgtactgctgtgaaaagtaaatttaccagcaagagtacagtttttatgtatttggtagctcctttttatctctagccttctagatttagtttttgcacattagatgccctttctctcctgctctgttgcaggtacttgtgattctgagggcctaagctatccatcagtctttttgagttgtcactttctgaggctactgagatgaattctgtcatggagaaacacagaagaataattacccagcgagccacaaggtttctaagatgaactttctggtgtaggatgtgtgatttttaatttttttatgccaaatatacagcttctatattcacagtaatactttacaaatcaccctatattgtgtgtcctttgtgtgctaactgaacatgagatagcccagcaatcctaaagggacactaggtagtgccttccacatagtaaccagagtccctttgccttggtttctgaatattcctcagcagtctgctaaaacgtacttttacccactcttaggtttattttgtcagtcagtgtttatatctttttttttttttttttgagacagagtctcgctctgttgcccaggttggagtgcaatggcgtgatcttggctcactgcaacctctgcctccggggttcaagcgattgtcctgcctcagcctcccaagtagctgggattacaggcgcccaccactacaacctgctaattttttttgtatttttagtagagacggggtttcgccatgttagtcaggctggtctcaaactcctgacctcaggtgatccacctgccccggcctcccaaagtgttgggattacaggcgtaagccaccacacccacccagtgttcttatctttttaagttctttatttaatttatacttttggaagtaaaggctttgtaagggagccagacttgacttttaccaaaaccacatcttaacatttttttggctaagtacagaaaaattatatgtatatttacagaacttacatttgtggaatatgtcttttattcttttatcagccaaaactatcctgaggtctgtgttttgtatttgaggaattttgggttttaatttcttaaaatctcttgaattctagtgagttagagattccatagggttgtactgttttccagtctaggaaatgatttaaaatagctgcctggtgctaatgttggaatgttcctagaaagtaaatatgtttccttgcatcttaagtctagagcatgtttggaaaggattcaagaattagaggacttgcttgctaaagaaaaagacaactctcgtcgcatgctgacagacaaagagagagagatggcggaaataagggatcaaatgcagcaacagctgaatgactatgaacagcttcttgatgtaaagttagccctggacatggaaatcagtgcttacaggaaactcttagaaggcgaagaagagaggtaaggaacttaagggtcaccctaccttatggtccactttttgcctctcaccctttttattgaaataaaaataaatagcattttaaaaagaactttattttcttggtcatttctttgaacacctaggtatagaagtagtaatagatcatatttctacctcatcgcagaaaatgttgctcaagtactcttagtttatttattattattactttaaatgctgaactgcatcaggatggattagttcctttgagattttaagtgttttggtgatttaatatattgtaaaatgccaaactggctgaaagagactttacatattatttatttatttatttatttatttatttatttatttatttatttttgagacagagtctcagcctgttgcccaggctagagtgcagtggtgtgattctcggctcactgcaaccttcacctcctggtttcaagcgatttgcctacctcagcctcctgagtaactgggattacaggcgtgtgtcaccacacccggctaattttgtttttagtagagaagaggtttcaccatgttggccaggctggtctcaaactcctgactgcaagtgacccacccgcctcagcctcccaaagtgctaggattacaggtgtgagccaccacgcccggctggctttatatatattttaaatctggtcaatgtataaatatttttgacacctgttctcagaaaagagttccaaaagggccaggtgcattgcctcatgcctgtaatcccggcactttgggaggccaaggcaggcggatcacatgaggtcaggagttcaagaccagcctggtcaacatggtgaaactccgtctctaatgaaaatacaaaaattagctgggcatggtggcaggcacctgtaatcccagctacttgggaggctgagacagaattgcttgaacctgggaggtggagtttgcagtgagccaagattgtgccattgcactccagcctgggtgacaagagtgaaactctgtctcacaaaaaaaagaaaaagaaaaaaaaagttccaaaaggaaagtggctgatttaggataaaaagccagataattttaatattatatccgttgtgatcataagaaagtacaggtacgaaaagagaaaaaagtacaccaactataacagtggctgtggtgggtggtggtagatcagatgactttctacccatttaccagacttcttgcattatggttatattacttccatccctagagaaaacattcagattgttattttttaaaaaagaaaattgacgatgggcaccttatgaagaagtttacattagttaaggtaaactttggctttggctaacagattgtaagtaatattttgctttagaaatgcatgggtgggatattcttcttcttattattattattttgagacaggttttcactctgtcacccaggctagagtgcagtggtgtgatctcagctcactgcagcctctgcctcccgggttcaagccattctcctgcctcagcctcctgagtagctagtattacaggcgcccaccaccacgcctggctaatttttgtatttttagtagagacggggtttcaccatgttggtcaggctgatcttgaactcctgacctcaagcaatccacctgccttggcctcccaaagtgctgttgggttacagacatgagcctctgtgcccagcccttgtttttttgttttttttttttttaaggcgagaagggcatatgtgttttaaaaatgaattgttttatttttcccatataggttgaagctgtctccaagcccttcttcccgtgtgacagtatcccgagcatcctcaagtcgtagtgtacgtacaactagaggaaagcggaagagggttgatgtggaagaatcagaggcgagtagtagtgttagcatctctcattccgcctcagccactggaaatgtttgcatcgaagaaattgatgttgatgggaaatttatccgcttgaagaacacttctgaacaggtaataaaatagacccttttttttctagcaaggctttgtggattgctagattctcttgcaattgtcatagctccttagtttttgtttggattcattacgtcttcatggaataagggtttatgtcctttttacttaaattcataaaataaaataaaaattaaaataggaggaggaagagttaggtacccttagtagtttaaagatttgcttcattaacccttctttagagggccagggcttttttgaaaagcatgttccttttatcacagtggttctgaggatgagttattattattctctgccctagccaaatttgtgaagaagttggagcaattggatgaaaatggtggatattctttcggtcattaacttaataaaaagcttactgaaagaaggagataagagcctggactcagatattaagggaatatttttccctgcaaataaatgaatgaacaaatgctaatactttacatgaaaaatagcatgaagccttattttgaaatatgtttaaaagtaaacatgaagtattcatagcagagatttctgaaatttagggctggggctttcgggagctctgtagtgtgggccttccctagctctgcatcaaggagctggaggccatgatgggttgtgagatgatactagaggaaggcatggtctgggagcgtgcaggcggcagtgggatggatgtcacatcttgaaacatatgttcagggcctgctaaaagtagttttgaaaattagtcttttctcaccacagttattaaaactatcttgcatgtggatgaatatgtaatttggatgagtgaaggagcactaatgagcaccaacagttttaatgctaaagagaataggctctaaggtctctttgtagccttttttttttttttgagtcttgctctgttgcccaggtcggagtgcagtggcatgatcttggctcctccacctcttgggttcaagagattctcctgcctcagcctcctgagtagctgggattacaggtgcacgcaagcacgcctgctgatttttgtatttttacacagggcttcaccatgttggccaggctggtctccaactcctgacctcaggtgatccacccgccttggcctcctaaagtgctgggattacaggcatgggccaccatgcccagccccactgaccctttttttgagccccttatgctttcatgtatgagagctgaatgtgggcagaagtgggacagatgcagaaggaaaatgacagattttcttctgtttctaagcttatgtgtctattttaaaagcttgaagtaatccaatacttgatgtttaaaaattgtgattatgacagctagatagtgctgtaaatttgaaagacccaccttatctagcagtgaatttgaccatttaatttggttcataccctgttcttccagttctgtcctctttaaagtcaagtaccttactaattaactcattgttgaagttactgtttgacaaaatgacagaatcgtgttttctttttatagtaggaaaacctgaaatgtgggaagatgaccataaagcggtcttagtttaactgcctgtatggattaatttatttgattattccacaactttctttatctttgaagtaacacccctcaccctcctttctgtgtgtaggatcaaccaatgggaggctgggagatgatcagaaaaattggagacacatcagtcagttataaatatacctcaagatatgtgctgaaggcaggccagactgttacagtaagtgaatctagtcatcatttaatttaacttcattgtgttaactaacaaagtaactcaaaaagttttttggctaaaagagaagcattttagaaatggccgttaaagtactttttatattattagggcattacaagtgctataaaagatttttaaaattctgtcttattgagagtagtgaagaatggacctttgaattatttttatcttgtctattccagtagatataaaagctatctctaggctgatacttatagcccagtgtcattcaggagacactgcttggcataaagaactgttaagaatttagcattaacatatgcctaaaacagcaatctctagccttgggtgagcttcagaatcatttgggtagtattttggtgttcaggccctacttcaccctttgctatctttagggttggggtaggagcctaggttttgaataaaagtccttagattataggcacccttgtaaattttcactaattggcattctgtgtcttgatttctaaatggctctctattggtatgttctgaaatactacatctttaatagttactgaattattattagcttactttttagagaagtatgtttcattgagtaatcaaagattcttttgcttttacttagtaggtagatttagctaacaataaaatatgttaactttgatacagatttcaaagaagtcactcttttcatcctaaaagaatgtagaggtgactgtctctttccttttatatattctttaaaaaatattaaacgcatgttttaaatgtgtttataattttatgttgatacaaaccttactgttgaagatcaaaggctcagacttctctttaaaaaggtgtattcagagagcatgatgccactttgtgaaaatatcaaatgctaatttggtaataatgggtaaaaatgggatcaactatcctaactacaatatcctttcttctcgttagtaattactatagtgagaaaaaattgctcactatagcaattgctattatatgtcttatggaagctgtataatgtggtaaaaagaatctgacattttagttcagaggattcagaattgagtgtgctctctatctcagaagtaatatggaagccttatgccaatcatgtgctttttctactgggtatactacctcagggactaaatacatggattctagagatctagtggataactcaattatcatataaaataatgtgatacttttttcccttcagttactggcattaaatgtgataagcagctctttggaacatggtagtaataagtgatctttctgtaaaattgcagaggcaaaagcaaagatcagtttaaaactctagaatagaaatatgagaaccacatgtgtaattttaaattttcttatagccgcattaaagtaaaaaagaaagacatgaattttagaactatattttatgaaacccaatatatccaaaatattgctttaacatgtaatcagtctaaaaagtcagatatttttacattcttttttttttatgtttagctaagtcttcaaaatctagtgtgtattttacccttacagcacattcatttcagactagccatattttaagtgctaacaagccacattttgctgcggtattgaatgacatggctataggacatattagttttaggttaagttagccagcaaggatactgacattttatgatgatgattactaacataaatcaactatgtgattacatataggctagtgagaaatattgcttacaattagggaaacactaacattccacatagtctgaatgttggaccagattcagttctttttttcagtttaatcccagttaatatcttgtgcccttttccatttgtaatgctgatgaaagatctggatgcttcaggggaacatctcaaaagtaagggctctctcctaatcagtaattcatagattttttttttcctgtttccaccccacccccccaccctttcttttttttgatagagacaggatttcaccattttgcccaggctggttttaaactccttagctcaagtgatctgcccgcctcggcctcccaaagtgctgtgattacaggctggagccactacacctggcccccattttgaaataatacttggctttgccatcttcagctttccttttgcagtcataaagtcttttatattctataacaatgtatggattacaaacttttctgtttctatttgtttttaaatgatctttctaagagatcagggctagtagtatccctgtagctaaaggcattgagtttcctagaggtgtagtgatttgtccagaattcaaacctaggctttctgactgccaggtgttcttcactctatccattctcttttgccagtagatatataaaaagaatttcatgctcatgagaagggaaatataattatttctttgacctatttcaatagcaattatattttcccttgaacagcgagtgatttatacatttccagcattctttttggagcgcagtctcagatactctagggtattgtgacattgtctgtttggagacgtaccagtttccataagattattctagataggctctctgctgcagaaggtctctttagttcttgctgtaggcagccagagaacattattagagggagtcacagaaggctctaacatggaaggatggcctataaaacccacagagtaatagaacgctgaggctaccattcactgagttagccagccactgaatgtgggttatcacttgctcttttcaataatcgcacctgttacaggtgccatttctaccctgttttatggatgactaaagtaaggtaacttgctcagggtcagctggtgtgtaaaggaactaggatgtgagtgtaggcagttttacttcagggtcttatatattatcatcttcacttatcagatggggaagctgaggccttgagaagctctgtgagttctcctggccacatagctgtgtatagcactctgtagctggggcatagttctcagacttttagaatcaagtgtttgagtctcatcgcattgctgtcgttggcgtgtgggagaactgggttctgggtgtactgacatgctttggttttttacagatttgggctgcaaacgctggtgtcacagccagccccccaactgacctcatctggaagaaccagaactcgtggggcactggcgaagatgtgaaggttatattgaaaaattctcagggagaggtatggccagtttatcaggaccaccacaatgttaatttcacttaaagttcactgtgcaagtataatcaagatcagattgaaacgtgcaataaccgattgcataaacagaccaaagctgctaagttaattgaactgaagctgtctttaagttttaggaataaataggagtgtattatagagtactgattattagcacaggctccagaacagattttctgtgtcctgtttctgttttcactgcacattagctttgtgactttgggcaagttacttcacctctcttagatttgtcatttaaaaatggatattaatgacacaatatccatgagctaataataagaatgagacagtacttgggaaatgcttggaatagtatctggcatagtacctttatctagtaaatgcttaaattattaaccttgttactagctctcagaatgttcatgaaactgtgagtttgaagattgtggagtgtacatcttcttggagtgtgtgttttcagtgtgtcagtcttagaatccttgtcaaagtaccttaccttccccattgccacataaagacactgcatatacccctaccaatactagtcttagaaatactacttcctaataaagcggctaaagtgtgctttgaagctagtaaaacatggcttcctccttgtctttccctagcgaatcaccttatccaggtgctgtaccacgcatcactgagcctctgtttagaatttgagtccctcctttgttgctattgccataagcatgttaatggagcttttgttgtgagttcagcatggtttgttcttctcattttccttttagttgtaatactgctttttcatcctttgcctaccaggagagctgtaagttggcttgcaaggaagccattggtcataaccttgttctgacatgcttactgattctgaccttttcacccagtttccaggctggcaggctctgctgtttgtaccttacaacctgactgggtatgcatttcagtctgagtggtgctgaaaggagatatatagggggaatgttaggctggcaaacctggtagggaagctaaccatatttacaagtgcagggctattcatttatttggaaaatcctgagtatctgctgtatgccagccactttgtgttaggaataagcaggaaaaaagccatacgtggtttctggcatcatggagcccacattgtaaagagagtaagggagccagggaataagataaagtgattttctgataaaggtaataaagataaactgtggtatcaggcccagcgcagtggctcatgcctgtaatcccagcactttgggaggccgaaggtgggtggatcacctgaggtcaggagttagagaccagcgtggccaacatggtgaaaccccgtctctactaaaaacacaagaattagccgggcatggtggcacgtgcctgtagtccaggctactcaggaagctgaggcaggagaattgcttgaactcgggatgagctgagattgcgccattgcactccagcctgggcgacagagcaagactgtgtctcaaataaataaataaagttacaggactcgctgagtaaagtttgtcaggagagggtccagaattgagccctagaaaatattgacattaggaataagagcaaaggaagtagaagatgcagccagtgaagtcagaggaaaatggtgtgtgatgtcaggaaagccaagggaggaaagtatctgtgaaaggagtggtcagcgggtcaaatcacaccgtccccttaggggttttttgtctgctcccatagtgccacgggcaggcctctaacctgcgtggtgctcatcacattgttctcactcactagaggaagcacactgagggcaagggcctgttctggtagatcctggtatcatgcttggcacataacaggaattcaggaagcatttactggatgcattttttaaaaaaaaatcagacatggaccttgacttacgttcagagaaataaagcaatagcagcattcattataagagtctgaggtgcctggataaaaagttctgttcatggccatcttcctgtctatccctcactgtaaccatgtctcttgtgaaacattgttaagagtggtgattggctcagataagactgaaaagcactgttataaggggtacaaggcagattaaatggactttcgtgagccatggaatctagtcattatttatgtcattttttttttctctgtgaaagtgtgttccaagttagaaacaatgttataggaggatatttggaatggagcagtaggtttaaatgccccaaaaaatagatacagtgacatgaacaaagtagtagatattatgacatgggatgcatcttcagacagtattactagtattactgatgacatattagtaaagctaactgaagcttagctccatttcataactcaaacattgaatagtagattatttgattgattgattggttggttggtccattcttttttttttttttggtgaaggagtttcactctgttgcccaggctggagtggagtggcatagcacgatctcggctcactgcaacctccgcctcctgcctcagcctcctgagtagctggaactacaggtgcgtgccaacacacctggctaatttttatatttttagtagagatggggttttaccatattggccaggatggtctcaatctcttgaccttgtgatccgtcacctcggcctcccaaagtgctgggattacaggtgtgagccaccatgcccggccaaggttggtccattcttttaacaaacttctaataccttcagcttgcgaggctctgttttaagtgagttctgtcagaaatgaggagagaaagtattatgaatacaggtcttatttcactagacagttacttttggcatttattcatttaattcgataagaccatatttgtcagtagggaccagaccacattaggaacaatctataaacaatccccgccataaagaccagtttgcagtaagattgttggtaactggcttagtcagttttgtttcttatgtttttttttttcttcttgctggggcattggaaatgtcagaaaacccaattaaactggcttagaaataatggaaattttttgggctcacataataaaaaatttaaatagtggacctaatccagtggctcacagcatgtccccggggatctgtctgttgtttctcttctggttgcctcccttggggacgcaggatagctgctggctgctcccagaggtacgtcttttctatttgctttttgtgggaaggtgatctttcaaaaaagtgctctttatggtggagtttatagattgttgctaacgtggtccggtactactgacagataaacatggtcttacccaattaaatgaatacataccaaaagtaactgtctaatgaaataagacctgtattcataccactttctctcctcgttcctgacagaactctctcagaacagcctagcaagcagaaggcagtagaagtttgttaaaagaatggacaatccagcccaccaaataatctgatattgagtgtttgaattatggagggaagctaaacttcatcccctgtgaggcacccatcctgggcttcactcacactggactagggtgggtcacgtgcccacctctaaaccagttcctggagttgggagggcggaattagagctcaagacttcttcctcccctctacagccacattgcactgggctccttgtgacacacgtgtgctccatggggggtgtgtacccaggtaaacctaggggctcttattcaggagggagggggcactgggtggttaaaaacagcgattgtcaccatggcaaaaacaagatgttttttatgagggaaataaaaaataaagcagtccttccaaactttccagaatatagatataatggaaacttttgtatatgcaaatgattacttatatatgtagagatgcaatatataaaatataaacaatcatctttcgtccacataagatcgccctgatttgtagcatttgctaatttctgtggtataaatactcctactgtggctgatgccaggcttccagcattatgtgactgagcacagagctgtgcagtgatgagcagcatcagcaggtgcagccagctccgggcaccactgcacagatcagtgcaccttcatatgcccaaggctcgcagcaggggcggaccaatgctgcattttatagacagagtaaagcctgtcatgtaagactatttatgtgaacctttcaggacacttggggtaaacacatttatttagtagcatcttgactaataacaatttccttgatctaaacctcccaacagctttttggttctaaattattatttattatttttctacctagatttttagacattagctcacccattttttatacggctttctgtattagattaattggtttttgcatgttttcaaatgaagagtgcttaacagcagggttacacttaaagtagttatgttaaggtaattcataataatgaagacaggcaagttgctgttttctgaggttctcattgaggctaatagtcttaagctacatcatgagccttaagagccaatgtttgcatatgggatgtataccacgagcttctagaagctggaatgtggtaattttgttatagaagattttatttgactcgttcctcattttaagatgagttgagaaaagctgggtactctcaaagttttttaagaatttatttttctgctttatatgctgctatctcctagttgatagcttgaacggtggttgatctaaagaatcacattttttttattactaatttggttaaaacactgatatttgtgaaatggctatttctgtttgtaaagatagaccaatttcacagaattgaagttactggctaattgagaggctcaaaatggtccatcttccttggtcctgcaagagtaataaaaaatccccacaaaatactgttctgccaccttactttatttacaaaacacattattgggcatatttcaaatcgaagtctcatttctgtgacactgggttttgattttctttctctgccattgtaaactagctggtctgtgttagataagcttttactgaagtaatattgtgtcttcccctgtagcattctctttcttgagtgaccttaggacagggtacagaataaaattatatgctctgcagcactcttgaggacacactcatttacttgctgccagatcatcaggttagccttgtgcttaagcaaaaacactgctgcatttgtgccaagtcagcattttccacaggaaagtaatctgtatttgacctttttagtagaaaatggaaatagttgctttctgtcatacctttagtgaatgataggagacctatttctgtacagaatacattggaacctcactagtacgttattggtaaatagtgtacagtgttcatctgtcttgattttgtttcattcaagaggtatcagttgctgaaaggaatgaaaggagcttgtcctttcttctcacttatcaggtggtcctgttgctggtagtccctgagatcacagttggcttccagcttcattttattcagcatttatttagcaccttatctttgccaggagctaagatctttaagctgaattcatgttgagttttataaagaatttagtatgtcaaataatttgtagaattcttagtaacagaataggataaaaagcagtggaaacttctcagcagatatttcgaattggatagtacttcctcccctgcaggaaatatggaaggtataagaactgctactaattatgcggaaatttcagtttagtaaccagaaagttactgatatacagctccccccgccccacccctttaaaaataataaacaggggccaagtgtggaggctcatgcctgtaatcccagcactttgggaggctgaggtgggtggatcacttgaaaccaggagttcaagaccagcctggccaacgtggcaaaaccccatctctactaaaaatgtataaaaattagccgcacgtggtggtgcatgcctgtaatcccagctactggggtggctgaggcatgagaatcgcttgaacctgggaagtgaaggtttcagtgaaccgaggtcatgccactgcacaccagcctgggcgacagagtgagactctgtctccaaaaaaagggatgaataatagtaataataataaacagaaatgctgtctcttttttttttcttttttgagacagtcttgctgtgacactggagtgcagtggcgtgatctcggctcactgcaacctcaatgcaagccattcttctgcctcagcctcctgagtagctgggattacaggcacgtgccatcatggccagctaatttttgtatttttagtagagacggggtttcaccatgttggtcaggctggtctctaactcctgacctcgggtgatctgcctgccttggcctcccaaagtgctgggattacaggtgtgagccactgcgcctggcaagaaatgctgtctcttaagcaaagaaaaggtccctctcccccgcatttggtgattttaagtgtgttttttaacttaaactactattgtttttaggaggttgctcaaagaagtacagtctttaaaacaaccatacctgaagaagaggaggaggaggaagaagcagctggagtggttgttgaggaagaacttttccaccagcaggtattactttatttatttaatatatttatttcaaattttattcacagaattacatgaagaccaagagtgtggttgggtttttcccctatcagttgatgaaccagcgcagttatctaccaagtggggtttgtactccccaaagggatattcaaggtgatactttagggtactggaagaatatgttggcacttttatttttattttttctcattgtaccaagtttcagttttgtcctttgttttctaatgtgcattatgtgttacagtaaaacatgtctatggattggatgtttactccaaacttgtttactctgtagggtcctatgattaaaaggtttagatcactaatttagagcaagaatctgcatataaactttaaaaaaacaaagtaatattcaacttcagtgtgaaacaaaattcttgctgtattaagttcctaatcattatctaattgaagatagattttggctgatggttgggcttttgagagcccttgaaataaagaaactccaaatttggttttaattataattaaattggaattattaataactaatgagccttcagtttatattctcaagctgtttgagtccgatcattaatcaaagtgtctacccttatcctgataagactttgtttccatggctccagatttttagtcttaagtctgctttgcttcattagccctagtcctggtctaaataaacactgtctcatatatttaacccccagggttgagaaccacttgaggtgggttgcatgaagtagcatgaattttttacctggatgccttctcatacattttggaggaatattttaaaacacatatgttacacttaacttacaagaaacaagcacaagttccattttctgtgcttcaatgggaaccatcgtaattactagaagtaaaataattatgtaagagataactcaaggcaccagacaagagggtcagcatgagttatatagcatgtcagatgctagaggaggtactccaggccagcagagtagttgagaagaactctgtgaggtgatgcttgtccactaatttgaaggatgggtgattatttggttattggagagaaggcagatgatggtgctctgaggatgttggaattcaccattgcttcactaacagaccaccccaaagcttagtggcttaaaacagtgatttcttacttcccataattctgtggtttgactgggctcagctgggcagtgtttctgttccacatgctgcagactgaactcaatcgagcaggctgtgttcagctcagaggttggcctcggctggaatatcttttaggtctctttctgtgtggatttctatgatttaagagtttagtcaaagctttatagcatggcaattgtctaacagagtaagtggagggtacaggtttctttcttttttcttttttttttttgagatagagtcttgctgtgtcgccaggctggagcgcagtggcgcaatctcagctcaccgcaacctccacctcccaggttcaagagatacccctgcctcagtctcccaagtagctgggattacaggcatgcgccaccacgcctggctaattttttatattgtagtagagatggagtttcaccatgttggccacgacaatctcaatctcaagagagtaccaggtttcttaaagggccctttgtaacattctcttagtcaaagtcatgaggccagtccagattcaaagtgggggtaaatagtctccacctgttggtgggaggaatggcaaagaattcatggtgatctttaactcactacagaggatgtgtaaagaatgtggccgggcacggtggcttacgcctgtaatcccagcagtttgggaggcaggcagatcacaaggtcaggagatcgagaccatcctggctaacacggtgaaaccccgtctctactaaaaatacaaaaaattagccgggcgtggtggcgggagcctgtagtcccagctactcgggaggctgaggcaggagaatggcgtgaacccgggaggcggagcttgcagtgagctgagatggcgccactgcactccagcttgggtgacagagtgagactctgcctcataaaaaaagacttaatgcaccaactatatccgctcatccagttattttgtagggttcatgtgagagttaaatgaagttgaaagattggaattaaactgacatagtctggaatgcttagggatgtagcttctgtacaatttggaacaaaggagaagttaagactgcattttaaaatatcactggccaagctgaatcagagggactaactctagagaggagattccagaggcagtgagggaatatataatggaaatttattaaggcttagtgactaaacttgagggtgagagaagaaaaaaaataaagatgtatgaggtttttagcttttgtgatcacagaaactaatgataccaaggttcataagagggaagatggaagggcagaacaggcgtttgaacttcatatttgaggatgaatccaatcgccttttgaattgattagaaatattttggtgaccttcaaaaaaccagttttagttcaatcagtggtgagtcacaagtcatattgtgaggttatatgaaattaatgagtgataaagaaatgggtagaggagccatgttgacttcaccttggaggacaaatccactgcagatggcttgggatgtgtaagttcaggatctagcaagctgtagtctccgatgtggttgttaaaagctgatccactgatctcctatttcctaagttatcaaaagaggttattgaacaatggttttcaaattgagctgcacattagaattactttaaaattatatatagatagctaccctttcccagtaaaatgagaaattcttatttgattgatcaagggacctagatcagaatttgttttaaactcctcaggatctgaatgtgtagccagagttgacaattactgttctggaatttgttggggggtattctagaaagaagtccataaaagaaggttagaggccagatacggtggctcacgcctgtaatcccagcactttgggaggccaagggcaggtggatcacttgaggccaggagttcaagaccagcctggctaacgtggtggtgatgcacacctgtagtcgcagctgctcgggaggctgaggcatgagaatcgcttgaacccaggaggtagaggttgcagtgagccaagattgcaccactgcactccagcctgggcaacagagtgagactctatctcaaacaaacaaagaaaaagaaaaaaagaaaaggttagaaaagatgagagatgataaagggtccatttgaggttaggtaatatggtttggtatccctgtagttaaaagtttttgtcttattttagaatactgtgatctatttctttagtattaatttttccttctgttttcctcatcagggaaccccaagagcatccaatagaagctgtgcaattatgtaaaattttcaactgtcttcctcaaaataaagaagtatggtaatctttacctgtatacagtgcagagccttctcagaagcacagaatatttttatatttcctttatgtgaatttttaagctgcaaatctgatggccttaatttcctttttgacactgaaagttttgtaaaagaaatcatgtccatacactttgttgcaagatgtgaattattgacactgaacttaataactgtgtactgttcggaaggggttcctcaaattttttgactttttttgtatgtgtgttttttctttttttttaagttcttatgaggaggggagggtaaataaaccactgtgcgtcttggtgtaatttgaagattgccccatctagactagcaatctcttcattattctctgctatatataaaacggtgctgtgagggaggggaaaagcatttttcaatatattgaacttttgtactgaatttttttgtaataagcaatcaaggttataattttttttaaaatagaaattttgtaagaaggcaatattaacctaatcaccatgtaagcactctggatgatggattccacaaaacttggttttatggttacttcttctcttagattcttaattcatgaggagggtgggggagggaggtggagggagggaagggtttctctattaaaatgcattcgttgtgttttttaagatagtgtaacttgcttaaatttcttatgtgacattaacaaataaaaaagctcttttaatattgatatactgtcctttttaacgctttaaaaacagattttgaggggagaaaagtattgtttcagttttgcttttgataaaaatataatttgacttctttgaactggatttttctttaaggctttgccagttgtggaagataagctattttgggggtctttcagtatttaattgtcattaataacaacaataataaaagcaataataataactaatgtttttgagccagatatcatgctcaatgcttcattacattttttagcttattaacaataaggccttttaaaatttcttcaggaaaaccaaataggaacagtagaaaacattgaggaagacattcctttttttttttttttttttttaaagacagaatctcactctgttgcccaggctgtagtgcaatggcacggtcttagctcactgcagccttgacctctcctgggctctgcctcccaagtagctgggactacaggcacacaccaccatgtccggctaatgtttttgtattcgtagagagcattttgtcatgtttcccatgctggacattcctagtaaaagaaaaaatgggaagaatattttagaatgtaattctactgtcttttaaaataggaagggccgagaaattgattaaaagccaccttttagaaaaataacatgaatgctatgaaatacgaatgtgctgtgtgtggggtagctttattatgtatggtgctaattatggtgtcaattcgtgtggatttggggaggttttgtcttgattgctttagttaagtgagttcatcttataggaagtgcaatatctgaactcttcctagaatggacagataatatttcagaagctaaccctagtcagtgtttgtttttctcttaaaatattcctgcagtaagctgcacaaagactaccagctttcacttgaaaataactcacaaagccccagaattactgtgttccgcagatttactgcatactttggtgccgtcgcagacacaagataaatgctgggttagaaattctgtctggtaaagcagataaaatgataacttctcaacgcagatttatcttcagagtgggaatggcattacagtacacagccaaactcagctgtgaaacattttgccacaagatggggttcttgtcatcaaaatacattctaggtgcttttattgctggataaattaggttataaaagccaacacttgaattaatttgggcattaagaaaaattggcagttgtaacatagtagaatagtgtgtatgctggggaaattgagagtacaaatgcagggctcaacataaacagtttgttgcccctggatgtgtggcagtagtagattcctgagtctgtttagactgacaaactttggactaaattgaggttttctgaaattgagctgcacctaaacccattcccgcagaatgtgagtgagctagagggcacgctgccatcctgtgtattaaaatcagcatctccgcatgaaattgatgttaggcatacagcatatatatacatttttggattatttatttgataacaagcatgattcacattttccccttgttttgtcttcagtgtttgttttcacctctgtttaggtatggatttattttattattttattttattttatttatttttttgagacagagtctcgctgttgttgcccaggctggagtgcaatggtgcaatctccgctcactgcaacctctgtctcccaggttcaagcgattctcctgcctcagcctcctgagtagttgggattacaggtgcacaccaccacgcctagatatggatttatttttattcctcttgttcaggtcttatctctgtgttcttcattaagaaaattttggatgttcttattttgttgagtattatctcatccccactgtctgttctttccttctggggtttcttttatacctgtgttgaacctgtcctgtttcatgtattttaggtttctccacactatattctcagttaactccttcgtatttatctca

SEQ ID NO: 771 - DNA, 140924 bp, Homo sapiens
gggattacaggcgtgagccaccacacccagcccagaatgtttattagaatgcacaattaataccagaggcagtggggaaggaaggactgagcagaggaggaagttgagttgtgattcaacccaacaactgcctggctggcatggggagctctggagttaaatagggccatcagactttcccagtgtggggccaacatgactgggtctttatacccccacctctgtcagtcactcaacgtggtctccctgcaacaaggtgactcttgcagccgagacaatccctgaagggacagaggctgaagcctgtctgccaacagcactcccagtggctggaacaagtccttccctataggggaatctgggcggcacacctccatctccatgtccatcacatacgatatcacagacatttaaatattttgataactgtacataagagtttcctttataatcttatagatcttattttatgcatttgaaaatattcttctgagacagggcttttatcatattgccatagggtgccacgatataaaaaaggttaaatactctctgattcagaagtatccaatgatgacttctctctcatgcatttaattgaaaatctggtttttctccttctctgctagttctctacctctctccccacctcccacatcatagcctattcacatatgtctgaatctcatgatagacaagttcaggttcttttcccaggttctttttaccacatccccccacccccacataaaaagtatatatggcacagcctaggttccacccaaatcctttctcctcttcttcctgggcccacaactctcctacatacattggtataccttgcgcttagggatggccatgtgactaagttctaacagtggaacatgatcagatgccacttccagcctctaagacagccagtgtgtttcctccataagctccttctcttcctcccaactggagactctaaatgatgaccctgcctcaagcaagcaaacaacaagtccctcaggggtggtgtaggctgcaaatggaaggagcttgagtcccaaaccttccacggagaaggctggctaccaacctggatcactcacccaagactgctcgaagagttggtttgaaccattgtgttttggggtctatttattacaacagtttagcttgctttgtgaatagatttagtggcagagcctccaaattctatagatacattgatctcagtcctaaccgcatctggaacaccattaaataaaggaattgcaaacccagagaaggtaatgaatttgtctaaggtcatacaagatggctaggatcaggacccaactctccagttttctttcttctctgctattctgccttctgtgatcctacataagtgggcatgattgtataacatatgcggccatgagatttctctttcagcaagagaaagggacaggaagaaagagagggaatgcattttcttggcctgaattagtgtgagccattagttacctacattgactaaattatctggaatgaacattcaactctacatcacatatagttaaaatgacagatctgcttaagattgtttctagcatacgttatttcaatttaggcaaatgtgaccattcagtgtgaggggaccatactgtcattaggtccctgtcagttctcaattatactgttatcttagagggggaaaaatgtgaaatttgaatgtagacgagtgttgatttgactgctacagtttattttacgtatagaaataaaataatgtgtagcaaaagcattattacaaagatgataatgaaataactagtatttataatagtataatagtatagtatttataatagtatgatagtttaatgactatttgtcagatgttgtgtaagaaactttatacacacacacacacacacctcatttaattcctgtatcaatcaggatacaggacgctgtggtaacaactcctcaaatctcggtggcttgcacaacaaatgcttatttcttttttttttttgacaccaagtcttgctctgtaacaggctggagtgcaatggtgcaatctcggctcactgcagcctctgcctcctgggttcaagcgattctcctgcctcagtctctcgagtagctgggaacacaggcacgcgccaccacatctggctaatttttgtgattttagtagagatgggatttcaccatgttgctcaggctggccttgaactcctgacctcaagcgatccacccacctcagcctcccaaagtgctgggattacaggcatgagccactgcgcccagccccaaatgtttatttcttgctcatgtgacatgtacttcctcgagtttttccttcctgagatctaagctgaaggaacagctctctggagccacgccattctggtggcggaaaggaagagtaaaagtggtagaaccttgcaatgctcttgaagcgcctatttggaatgtctacatcatgtaaatggtaatggacaagtatgtataatccccacaccaaaaaaaggggacactattggggacaataaccacatttcaatgctgcaagacggatattgactgcacccccttcccactttcagaaagaagaagagtaattttgctgaactccttctagagactggaaatgtcccttccagttggggtgattagggaaggctttggtaaaatttgagctagagtttgaaggttaggtagactactggtgggtgaagaaagaacaaggacctttgtaggcaaaggaaaacctcagaattacagaggtggaaaaagagttctagtcaagccacttcagctggctacagagtaggtgggaaagaaaatgggaggacaagggctcagatgatggggggttggggcattggggggacacttgaaagctaaactaaggggttgaacttaatttaggaggcagttagaagcttttacatatttttgagcaagagagtgacataattaaaatgatctgggccaggtgtggtggctcacacctgtaatcccagcactttgggaggctgaggagcttgggtcacctgaggtcaggagatcgagaccagcctggccaacatggtgaaatcccgtcctactaaaaatacaaaaattagccgggagtggtggcatatgcctgtaatcccagtagctgggaggctgagacaggaaaatcgcttgaacccgggaaacaggttgcagtgagccgagatcgtgccactgcactccagcctgggcaacagagcgagactccatctcaaaaaaacaaaacaaacacacacaaaaaaccaaaaataaataaataaaatgatcacttctgaatactgatctaactaggggttgcagggtgggctgatatagggagaaactggagagcaaggagatcactaaggtccctacatgtccagaaccaagatagaggtcttgaactaggatggtggcagttagaacaacaacaacaaaaagtcaattccaggctgagtgcagtggctcatgcttgtaatcccaacgctttgggaggctgaggtgggagttagaaagcagcctgggcaacactgcaagacctcctctctaaaaaaaaaaaaaaaaaaaagttagccaggtgtggtggtgcccacctgtagtcccagcaactcagaaggctgaggtgggaagattgcttgagccccaggagttcaagcttgccgtgagctacgattgtgccactgcactccagcctgagcaagaccttgtctccaaaaaaaggtcaattccactgacttttctaaggtgtacaccatcaaggggcagctccatctccaggccattggctcatgagacattctgtagtcagaaggctagggcagattgctttgagcaagcccccatggtggttctcactcctacttctttgggtatatgcccctctgtttaaaaataaagttaatatgcatttaaaaaaaaaaaggagaaaaaggtcagttccagaaactgtgtgaataaagcattttacttgctttttctattaatctataacatatgttgattttttaaaaagaatataagagctatgcaaattggagcttcaagacaacttcccatctccctaggaggagatggctgccctaaacccccctacatagaaatcatcccactgcttgggcttaaacttgatgttggggaaatgaaaaatccaagctaaggccgaagcctggggcctgggcgaccagcagaatgaggaccactggtcagtttcaggctgaggtgcgtcttccaggggacaatctctagctggcccttaaacattcagacttcaagctctatttacagcataaaggtgtttcaaaagacgtgatacaaataactgcaaatgctctgcgatgtgttaagcactgtttgaaattcgtctaatttaagatttttttttctgacgtaacggttagattcacgtttctttttttttaagtacagttctactgtattgtaactgagttagcttgctttaagccgatttgttaaggaaaggattcaccttggtcagtaacaaaaaaggtgggaaaaaagcaaggagaaaggaagcagcctgggggaaagagaccttagccaggggggcggtttcgggactacgaagggtcggggcggacggactcgagggccggccacgtggaaggccgctcaggacttctgtaggagaggacaccgccccaggctgactgaaagtaaagggcagcggacccagcggcggagccactggccttgccccgaccccgcatggcccgaaggaggacacccacccccacaacgacacaaagactccaactacaggaggtggagaaagcgcgtgcgccacggaacgcgcgtgcgcgctgcggtcagcgccgcggcctgaggcgtagcgggagggggaccgcgaaagggcagcgccgagaggaacgagccgggagacgccggacggccgagcggcagggcgctcgcgcgcgcccactagtggccggaggagaaggctcccgcggaggccgcgctgcccgccccctcccctggggaggctcgcgttcccgctgctcgcgcctgcgccgcccgccggcctcaggaacgcgccctcttcgccggcgcgcgccctcgcagtcaccgccacccaccagctccggcaccaacagcagcgccgctgccaccgcccaccttctgccgccgccaccacagccaccttctcctcctccgctgtcctctcccgtcctcgcctctgtcgactatcaggtaagcgccgcggctccgaaatctgcctcgccgtccgcctctgtgcacccctgcgccgccgcccctcgccctccctctccgcagactggggcttcgtgcgccgggcatcggtcggggccaccgcagggcccctccctgcctcccctgctcgggggctggggccagggcggcctggaaagggacctgagcaagggatgcacgcacgcgtgagtgcgcgcgtgtgtgtgtgctggagggtcttcaccaccagattcgcgcagaccccaggtggaggctgtgccggcagggtggggcgcggcggcggtgacttgggggagggggctgcccttcactctcgactgcagccttttgccgcaatgggcgtgtgtgtgtgtgtgtgtgtgtgtgtgtgtgtgtgtgtgtgtgtggaggggtccgataacgacccccgaaaccgaatctgaaatccgctgtccctgccgctgttcgccatcagctctaagaaagacgtggatcgggttctagaaaagatgactccctgcacgcccctccctgcacctcccgagcagtgattccgacagggccttcactgcccctgattttaggcgggggccggccccctccccttttcctccttcagaaacccgtaggggacatttgggggctgggagaaatcgaggagatggggaggggtccacgcgctgtcactttagttgcccttccccctgcgcacgcctggcacagagacgcgagcagcgccgtgcctgagaacagtgcgcggatcccactgtgcacgctcgcaaaggcagggttcacctggcctggcgatgtggacggactcggcggccgctggtccccgttcgcgggcacgcacagccgcagccacgcacggatgggcgcggggctgcaggtgcatctcggggcggatttctttctcagcgctcggagcgcagggcgcccggcgtgtgcgctccctgccggaggcgcggggctggcgcgcagggctcgcccctcactgcggcagtgggtgtggaccctggtgggcgaggaagggggaggataggctgtgcctcctcccactcccgcccccagcccccctttttttccccctcggaacgcgaggtgccatcttttttcggcgtgtcacgtctttacggtgccatgccaaaccgggtggccgggcttcataggacagggcggggcctggcattaaagggagggggacaatcagcgctgaaatcttggcgttttgctgctgcgggcgtgagcactgggggcgttcgcccagcaccttcttcgggggctctttgctttgtctgtagaggttacgtgatctgcgctcccagccctggtttctggcttttattctgagggtgttcagtcaacctcccccctacgcccatgcgcctctctttcctttttcgctcctcatttccgagcccattgttggatctcgaggcttgctgggttcgatgaactcgagtcaaccccccgacccccggcacgcatggaacgggcgtgaccgcgcgcagcctcgtctcggagtctgccggcgccgggaagcttctgaagggatgggattcgagtctccgtgcgcgctgcgggcggcggcagagggatctcgcccctccctacaccccaagtgtcctgagggccacgccacaccaggttgcccagcgagggacgctggctacccatccggggatgggtggggagccctggcggggcctctccggctttacgccctgttgcttcgcctggccggagaatgtgaggaaggggcataaggttactggtgcttcggccacacccatctttctgagcccactggactgggcgcagaggggggattgccatggaaaccacaggtgtccggagaggggatcttggggctggcctcaccccttccctgcggagattggggaccctggggtagggggagccgcgcccagtcggcctcctggaggacacgggaggaagccccgaacccccgcgcctgaggctgtttctgattggcccctggaggccgcagacacgcagataggcggccctgggtgtatttttattaatattatgtccgtactgattaatattatttatcttaaataaatttcacccgtgtccaagttcaccgcgcccccaaaaccgagtctggggcggcagggggaactcctggccaacgaatccatgcctcgccctcctgtgatgaacctggtacgcacggttttctggttaattctatcgctgaaaactggtgcggggggcgcacttctgagacggaagagcatctaggagctgaatcctccacgcgggtcgcccaggttgatctgaatttctggggaatggcttggctgcccgcccgggaccaggccgaccctccttgacggtggcgtagagggctggagcctgggtactgcgaggctcctcgcatggctgggcccgccgcgaggggttgcagagcggctcagggatcgattcaagcatcgtctctcctccctcgcccccagacagagctgggcgcggggttccccttccagatggagcgagggtctcggggtggccccggaaaaggggagcccgcggccacggctacgtattgccatctcgcgagcagagatgtcacctcctgcctttggaggaaagggagcccggtggggatgagcgcatttagcccaatgctgggaacaaagcgcactccgcgcttctgcgatttcgctccattttgaaatgtgttggcgctttggtggggccgctgcggtgggcaaggccgggggcgctgttaatggaggaacctcagggggacggtccttcgtaggaaactctatcctggctctgcgcgcgctttaaggaaatggcttccctccaggacctcgagggatgcagcttttgcgcggatgacggtggggtgctgaaccagccggtgcgcctctggaaatgtctgggcacggatcctggggccatcgacgactcctccccattcccagcaggcgggagctcttacattccgagcgagtgacccctctcaccctctggcgctcacacacctgtaactccaaacctccgtctcagaatggtccaggctggaagggatgatgggggctccgacagcgactgcctagctcacccctctgcgtgctcaggctccaggctcagcaggaccaatttgagttctatctgatccccctcggccccttaactgacccatcctacaggagacagggaaatgtctttcctaccgcggttgattctggggtgtcattttgtgttttgtgatggctgcttatatttactgtataagcattgtatttactgtataagcattgtattataattactgtataagctgcttatatttactgtataagcatctccaaatcctccctctacgtaaacaaattaatggataaacagataagtgtatcccctgcccccacccctgctacgcaggtccggagtgactcttgaagctcatacattccttggccaagtttgcttctctaacagatgtttatatagcaataacctggcttggctcttgggttcacctttggacgatttggggaaggggcttgttggctttgctgggttttggatgagtgacagtccatgactgttcctgctggaagggcgtgacttttaagtggtttctaatatcaggcattgctcctccgacaggaacaaaagaaatggatactgcccataaattgttagaaaacttagaatcgctttgattgaggaaaggttagatttattccggttggaaaaagtggcctttctattaaacgtgccctttgaccctcatgcccttggaggtcggtgccagcctggagatgggataagattgtggttttccttctgcctttttaacatctgttgttacagtccatttgttgaaaatttaaagaaactgttttattccactttccctcagcatttatgtgtgtggtttcagtagctctgtggctatatgtacgaacacgtgttatttttccaattggacatgtgataattttccaactggaccttgccttctattgatgtatttatttagcatcttccttactccctccttgaaaaagaatcactcaaaaacaaataaaaacagccgtaggggcctaatacagtgctagacatacaagaggtattcggtccataccaaatggattttatccatgaaggataaatggggaaatacagtgggaagcaggtgggaaactgcgtttgactctgctctttcctccaccaccactttcctcatcaccgtgttcagagacccccaaagccccctcacactcccagaaacacccccctggccactcctaacttgccatgcccaggagttaggtgcttccactagtgacatggagctggcgtttggggggcacctcagcaggtgacgggaagagaagaccccagcctcaccagctgggctgcagcagggagaggagtcctcatgttccagcagggactctcagctgttttcctgtaaaaccatggttctcaactgggggccactgagatgtctagagagatgtttttgttttcacaactcggggagggtgctactgacatcttgtgggtagaggccaggaatgctgttaaacatcctacaaggaaggcacaggacagtctcctacatcaaaatatgacccagtcccaatgtcaccactgctggggttgacactggcactgctatcttaattacattcattgagtgtcttttaggaggccctattctaagtgcttgctaagattatctcatttaatcctcacaacacttccgctatgtagcaggtgctgttattatctccgtgatggggaaactgaagcacagagagggttagtaacttgctaaaggtcacagagccagtgggtggtggagctggttgcctgacactagttccctcccctctcagccacatgtgggtttacttggccattgtggactagtctgggaacccagatatgatctataacattgacccagtagaatattgattccaaaaccactgtctcacaaatgaatttttacaagagtctgtaatcggagcatgacccagaataaggttagggagatgtggagttaaagctctcaatttcttatctggccccgacacagagagcaaggcatttcactctacattggtgctctgtttataaaacaaagagcaaatatctcttcctaaggtccttaaacctcttcccccaatccagggtttctggactgctctgccatatgacggggcagctggtttgattgacccagggaaggctggaaatcaagactgggggatcaagacgtagattcagtgtggccaaggtcaagtctctgaggtttagggacatcagatccccagcttaggttctgtacctcggcaaggtgaaagcgttggcgcccactgatgaggcctgctctgagattgtgggtgtgggttgagttgggtgggcataggcaagtcctcttgtaagaatcttttggcaaagatgggcctgggaggcttttctcacttcctggggcccaggctttgcaataagtattccattatactgtggtaccttggggctacctgagaatcctctgtctcgcccctgttgccttgccaaagagtttgctgtccaagaattcctttcctgtctccaggtgccatgctcctgccacctctgccaggttccctgcctgcccagatggctcccaactgagtgtgaggaggaatttgagacaggttttgagctttctgggttctccagttaggaaactttctgtaagcatgcagatagaatgggcttcagcaaaatacaaactcgaacaacttccatgtatagtcccttaattttctttgcttttttcatatttcatcaggctccatgctgagcccaatcagggacccgatagaaatccaaacaccatgtcagcgagtccccaagaaatgcattttgtgccaaggctattcaaggaaggtttgggagcagctcaagggcagacactgttaccctcccccaggtccccagtgcagggcagtgttctgcatgtggaggcagtttggcctaatggttaaggaggtaggctctgatcgggcctcctgggcacaaatcccagctccctgctcactgtgagacctaagccatattgtttagctgcttggagagttttttgtcatccacaacttggagtatgatggtacctgtctcacgggttgccatggggttcacacaagctaacccggtactcactagggccaagcacatagtaactgctcagtaaatggcatcatcggcggtgtcctgtggatgagtgcttgtgattggctgaatgaccagaggggtctaaagatcctggtgatggaatcagttgtacagataaattgttacactgagtagggatcaagataggaaaagtcggcaactacccagctcccctgcaccaaactgggcagaagtggatcctctgaaaattgcacacacccatgtttaaatgtacacacagaactcttgccacaggcaagcggagatttgtcatctgctgtccctgcctcatcttcttcctgaaatccactccatgccaggaataaactgcatgctctccaccagcccaaactgacctgccttcccgccagccatcccgggcagggtgacctggcttagtacatcgggttcagagatctttccagtttactcgttgaataaaaagtgagggctgatcgagaaagtaatggcagtcagggaaggcgaaggaggtaaagaagagattttacaaatgaagtaattcaacagagtgctgacattggtaaactggcaaacagatttcagggtggttggttgagagtagagtagaaaaggattaaataaagcaaacttgtggtgtactgaatcttaggaattccatgtatccaataagtatagtcatttatgaattaataaattcggcctaagaagccttcttatcgcttaaatcaagactaagtaacaatatatcagttttaaaaagtcattatatcagaaaatcatttaaatgatacacatagatttccaagattttactttaaccgaaactatataaatgtgaatttgttcacccatcttttgacacagggctcaggtcttctcttggtgtctggatcagccagttgaaatttcttgtctgttttgcctatgccacattaataatgcactgtctgggtcctccgatttcagtttggattttgggtttacattgtggagtcatctgaatgcagaatccttcagggattttacttttttttttttttttcatggtctttaccatcccatttgatagtaaatattactcacctttatgaagtctttccaaaacattcaactaaattttcttaaaatcattgaatgatttgaagagcttattcctcagcacttttactccatcagcttgcaccttattttttaatctttttttgagacggagtctcgctctatcgcccaggcttaagtgcaatggcgcgatcttggctcactgcgacctccacctcctgggttcaagcaattccgcctcagcctccgccgtagccgggactacaggtacacaccataatgctcggctgatttttgtatttttgtagggatggggtatcgccatgttggccaggctggtcccgaacttctgacccaagtgatccacccacctcggcctcccaaagtgctgggattacaggtgtgagccaccgcgcccggccagcttgcaccttatttaggatatgtgattattatagcaagtctggtgtacatacaagattttgaatgggcacagatgacctttagtaagtgcttggctgtgataagaggcagtcctgactgcagatcaggctgtgtggaccccagccttgcatgtttacagaccttcatgtcttattcttacagggtatcagaagaacacctactggggaaacttataaattagtaaaaggtgggcattctccccgcccatcttctgtctgtctgccaggactagcacagcactttgaagtcattcacatagaatcccaacttaagagggtaaaatcctcctcaacagactgaaaataagtttaaattccctttgctatattaactcccctgaggaaagagtcttagatcaatgtccaacactaaaaacagttttaaatcagcaagtgagaattaaatctgaagcaattgataataatgtttcattcattcctctcctttggccccgtccaccctactgctaaatccaggcatcaaagagaagagggacataattatctctagtcccagctgctggttttccttccagcctatggcccagttttctgttttactgagaaggctggtgatgttatcttgggatctaagtctgcagtttcaccacaaaaagtccagggatgcactttcatgcttgtgtcctcctccctgggatagcaaggatattagaagacccctggctctgtaattgcttgtcatgtgctctacagacgccacagaatgccaagaacgaagtgctgggaaggacaaattcatggaaccgtgggacggtgctcctcccccagcgtaaaggacagctcctcctcctgaattggagccagcgttctaaatcatgtgtcaacagagttgtcctggatcggatccagttctgccattgatttgcaggtcatttcagtggtacctgtttccagttgttcttaattgaacagtggcaccaaactattgtcttgcctcatccccctcccatggcctgtcccccaaaaagagacttcttgggtaattaatcagggcaacatcaggcagtctgggcgcggtggctcacgcctgtaatcccagcactttgggaggccgaggcgggcagatcatgaggttaggagattgagaccatcctggctttgtgaaaccccgtctctactaaaaatacaaaaaattagccgggcgtggtggcgggcgcctgtagtcccagctactcgagaggctgaggcaggggaatggcgtgaacccgggaggtggaggttgcagtgagccgagatcgcaccactgcactctagcctgggcgacagagctagacttcttctcaaaaaaaaaaaaaaaaaggaatctctttggttttatatatttttttttatatatataatatatattaaaatataatatatatatttatataatataatatataaatatattatatattatatatttttatatattatatattatatatattatatattatatatttatatatttatatattatatatatttatatattatatatttatatatattatatatttatatataatatatattatatattatatattatatattatatattatatatttatatatattatatattatatatattatatattatatatttatatattatatatttatatatattatatattatatattatatatttatatattatatatttatatattatatatatttatatatattatatattatatattatatatgtatatattatatatgttatatattatatatatttatatatataatatattgtatatattatatatctaatatattatatatattatatatattatatattataatatatattatatattatatatatttttatatatataatatgtataatatataatatatataaaaacatatataatatatattatatattatatatatattatatatattatatatattaaatatattttatatatattatatatattatatatattaaatatattttatatatattatatatatatacacatatatatatataaatgaggccaggctcggtggctcacacttgtaatcccagcactgtgggaggatcacttgaagccaggagtctgagactagcctgggcaacaaaacaagatcctgtctctacaaaaggaaactgtaaaaattagctgggcatgatggcatgtgtctgtagccctagctacttgggaggccgaagcaggaggatcgcttgagcccaggagttcaaggctacagtgagctatgattgtcccatagcactccagcctgggtaacacagcaaggccctgtctctaaactttttttttttaattctatttatatttacatgtatttaaatgtgaatattcactacctatttgttgcatgcctgcattttttatactgggcttgccaaaaacccgaacagctttctactttgacaatgtatcagaatttaaatcagcaatatgttaataagccaagcaaaggttatatatgcaaataaaactgttgtctataacctcctgttacactggggcacagcaaaagtcatggtgtagtcgcatgtgaacctgtccctttcatagctgctcattgccaggaaacatcaggaatagccatttggaagagtcatcagccctcccaccatccgttttctgtcttgtcttttccctatgagcaggggaaattccacgctggccccaatccccagtgcagcggctcagcctctgcctctgctgctggtccccatgaggccagcttagaaacggaggattttgcagaacatccctaaatccgcttgaataatgaagtgatcattcataaactcacctgaaccttattaaaacctatttaatatttttcctggataatcctatagggataacttgcctcctgggcttctctccaccgggttcagttcttcctttagtggtgaagttcctcccttcttagcatctcaactgtgcctgagaaaaggccagtggcggctgcactctgttccctgtggagtgttaataaagactgaataaattgaaataaatccctttcaatgtcattaagtgctataaataatcatgaaccaatgttcgatggctgatgagaaatgcaagaaaaaatttttaatcagtaggattcataagttgacaatctgggccaagttaaaaaaaataaaaataaaaagacttttaaaaagatcttatcgtttgttaccagtaagactgaattccagaagcaagctactccctcatttgtgggcccctgttatcactggctgcttagggttgccaagccctgaattcatttgtcaactaagagatttttggccaagattaagatttcccatgcctccatatttccatctgagaaatggagattatactgtcttccccctcagaatggatgataatgtggtctctcttctgttcgcatagtcatagaactgaaataaaacaacttaagagaattcctttgagcttctcagaagtgctgcagggctgggggatgcctcccaggagccgcagtcaggtgctgatctgaagtctttggtgggctgactttagcctgacctgaaatagtatagctgctgccacctggctcccttagcgtcagtcagacggtgcagctggttcctaggggtgagggctgagccagcagggtccgtgcccaggagggatgcatgggtggccacagcccagcctgcactgatcttgtctgtccccttctttggaaggaaggagccccaaaccagggtgcaagacagtgggtgggggtgccttgagcatgacctcaagtgatttccagcccctgccagtgctgacttctctggggaagggctgggacttccttctgggctcaagtcacgacccttggatggaatttcctgggagcttttctgttttttctggagttttcagttttttcctaaccagacagggacttggtacagaatctcatattctaattatgcctaggagcagcctctccccaccactcacagtgtttagcatgtgacaggaatcgattaaggcatgagtgattaaattaaagccaggcattgacttggatggtgtaatattctgacatctgtttggtgtcaaaggcacggggcaggcgcgttaattgaactgcttgcacctggcatttgaattgagccagagcggggctaaagtcagtttgccttcaccctgtaaatggagggtttctccggagcgtggatggtgggaggtatttcagggtgtatgcataacccccaccctgacaatggcccatctcttctccagcgtggccaggtttgagtgccagtcctgggtgtccagtggccccatagccttgcgttttagtaaaatgctgcccccattaccacctggtctgtgcacttcggtcactggaatttgccatcttccagtcccgaatgtggcaagccatggagccttaagctcttctccctccacatcctggaacagacccgccagtttcttccaggcattgcctcagtttgcccctctgtttccagtcacactctcaccagcgataaaatgattttagaccttatcatctcaccctcggatccttatggaaacaataatgagttgttccctgtttcaattccaaaattcatatccaatccgttttgcatgccattgccaaattcctcccagagcaaccccgtcacctgccctggccctctccaagtgtggtcctgccatgggcatcgcctgctaagccaagctggcctcgagctgcctgcccgggtccccacaccttggctcacctccctgcccagtcccgcctcctgccagcctgccctgtggctccttcatagatgccgtgctctttctgccccttgctcacccatggcagccttgcccctctctccctgccccaccccctatttaaattgacctgaccttcctcagtgtccatcttccccgaagctttccccagccttggcactcaaggtccagaggctacgcgtttcctctcacctgtggcagcgccgtgctccccagtgcctcacagtttccttcttgcccccgcttcctgtgtaggactcatctgcccacaggttgcacgtcctgtgagggcaaggactgtgtcttatgtgactttccttctccagtcacagagctgggcacatagatagctcaaaaccctctttattaacacagttggatgttgagaaatcaaacaggccaatgtcaaatgagctctccttatttaaatcaagtcagttctccacctcctagcactcagttccagtactctatatacatggaaataataaaaaacacatttcctttgaaacattctataatcgttcctttgccctacttcagaccaacttaacgcactccccattggtccaaatgagttttgctatacgaagatgctgataataatagcagcagtggattattctgctaaaaccattgcctcgttaatcctcagtcccgaggtggggattattatcctcattttgcagagaagcaaactgagactcagagatttcacagctggggagggagccagctcatccctctgtccaggcccaagctctctcccgcttgccttcctgcctctgcaacctcagagcatcccccatctggttctactgcctgtgctagtcgtgcaggagccaaaagacacgtctttagtgctaaggactggagaagccatgccctccagcctctgtgaatgggtcatatgtaacatgagcctggagaaattatttgaaaccaaaggcaagcctctaaaccaggctgctgcttcatggcgccggtgacggcagaaccaaatttagtgctgtgggcaggtccacacttatcaaatagagaagctcatttttcttccggctcacatcaagcatgaaaaatgttcacacataccccccacacacacatgctttccggaggggtccatgtggctagaggctggaagatgtggatgagaggagcctggcaggtaagcccagggaagatgacattcagcttcccagacagcatctacagggagaaatttaattaaaagtggggcggtttccctgagcaaggcagacaaagtcagccctctactgttaagaaaaagggtcacagtgagaggggaggtgaggagactgagtctgtattttctagtctgttgggctacactacctgatcccccttcctcaaaaatccactttactttccccatgtctacaccaatgtggttcacactctgggaccaggaaaagggggagtgatggggaacagagaagggaggagctcacacagctgaggctggggttatgcatatcgaattacttagaatttgcaacctcacagggtactttcatggcgttgaaatacacttcccacagccaccctccctctaactaaaagcaagagtcatttctcagttctggtcttgcctcccacgttctcctccacatttaagaaaatccaccagctacaaagtgaagataccatatgtgatatcccaccctagtttctgttttatcagggtttggagcaggtggagcaggcagagggatcatttcagcctataaattgtattaagggtgagtactgagtcattcttcaagaaaagttttagaagcatccaaaactgaagggtggagccacctggagacagtatcatcagtcctggccccgagcatggcctgcataggcccccatggatcccagcgggagctgcagagtgcgggcaccttggcacacagccctgagtgcaaaattaggagctgggcagagggcatctctctgtcgccattgggcagcccagggcacactggtcatagccttagaccacgaacaccctgtgcccgggggacagatgcaaccagtgtgccctgggctgcccaatggcaacagagagatcgacacctggaccccatgtcacggggactccactactaaggctcctaagactgccaccttccagtgggataagccctgcctcctactgggcccacaatgtgcagagaacacttgggactacctggctttctggatacacaaatattgatccaatctggactaattagaaggtcagtcccaataacaaatcgaagtcagctgggcgtgatggctcactcctataatcccagcactttgggaggctgaggtgggcagatcatttgaagccagaagttcaagaccagcctgggcaacatagcaaaaccctgtctctactaaaaatacaaataattaggctgggtgtggtggctcatgcctgtaatcccaacagtttgggaggctgaggcaggtggtcacctgaggtcaggagtttgagaccagcctggccaacagggtgaaaccccgtgtctactaaaaacataaaaattagccaagcatgatggcatgtgcctataatcctggctactagggaggctgagacaggagagaatcgcttgaatccaggaggtggttgcagtgagctgagatggtgccactgcactccagcctggttgacagagcaagactctgtctcaaaaaaaaaaaaaaaaaaaaaaaaagccatgcctggtggagcactacgtgtaatctcagctatttgggaggctgaggcacgagaatcacttgaacctgggaggcagtggttgcagtgagctgagatcgcgccactgcactccagcctgggcgacagagtgagtgagactccatttcaaaaaaataataaatctgagtcactttaatattgttatttggatgtcaacctctaggtgtttgagacaggagagtgatatgggggcactggaaacacacaggcacggggtgtcctcacacttgggtagcccacacgatgtgatttcagggtgctgggaggtccccccactccccaaattactaacaagtggatagtactttacagtttatatgatctcatttgattcttaacatgagcctgtgagtgaaaaattccttcccctcttctacagattaggacgttgagattcagggaggttcagagggattcagggaagtcaagtggcacctggagtcccgtggctaatttgaggccggtaggggattcgaacccaggatttgtgcttcttatgcctgggcttctgctccctggggcatggtcttccccctagctttcccattcactgctttagcctaggggtcctaccctttattaaactgccagtgcctcactgcttttctcccccaaagacaaaaaaaaagtgtttttgcttttgttttgtttttcatgggcagagacctggaatttcagcttgagaatttgtgccatatgataaataaatcaacagatggctttttccttaaaaaaaaaaaaaaaaaaaactaagatgtatttgcagtgaggcataatttgtaccaaaaagtgctcaccacactgtagtcatgggggcaggaggcagccgcgggtgaagggagaaatcttggagtccaggcagcccccttctgggctgaactggggagctgggggtgctgccagccctgccaggttctcctaggaggcggcagctcatatggctgtgggaggaggcagagggagcctcatatgcacccacatttccagggatctagaagacagaaggaggaaaaccaccatcatgttaaagcagacagttaggtaacacatcctgtaatacaagttattttttccacatctaaaggctaaaaatagttgttagaatttaaagataattggtaaatgagtttctatccttctagtttcacatcaaatggaatcatgctgccttcacatcactagtgcccgttatttgtgtttaatttccacaatgttgtctaattccactctttgggcttccccagggatccagcctccctcactcgcccatcgcagggagatgctttattcatctttgtgtcttctgtgccgggcatagcgcatggcacagaataagcactcagtaattgattcacgagtgaataaatggatgagtgggtgagttcaatattgactacaaaaaccctaaggccacactggtgagtggctgcgcctgtagtcccagctgctggggaatctgaggcaggaggatctcttgagcccaggagtttgaaactagcctgggcgatatagcgagaacctgtctcaaatgacaaaaacagggccaggtgcagtggctcacgcctggaatcccagcactttaggaggccaagatgggaggatcacttgaggccaggagtccgagaccagcctgggcaacatagggagaccctgtctctacaaaaaattttttaaaaattagctgggcatggcggtgtgcgcttgtagtcccagctactcaggaggctgaggcaggaggatcacttgagcccaggaaattgaggctgcagcgagccatgatggcaccactgcactgcagcctgggcgtcagaacgagacctgctctcaaaaaaacaaacaaacaacaaaaaaaaaggctttcttaaagagacttgagaacagaaaggggaacagatacataacttatatatttatttgttcatctttccaccttcctggagggtggaggggaacaggtctgtatttggagttttgaatgctaaaagtgggaatacatgtactgtttgccatgatctgttcaaaagttaagccaaatgccttagattctcctgaaaactggaatgccactgtaaactataagccccacttcaaagataaaagatcttgatgaacagggctgggtctgtggactgggcctctccccaccacacaaggaagggtggtgccagttgaaggaaaatcacttaaatccttgctgtctcctaataaggtgtggtcccaggtagggctgtcagaattagcaaattaaaacacagggcatctgtgaaaattagaatttcagataacaacaaataattggcataggctgcataatgtccctcaaagatatcaggtcctaatctccagaacctgtaaatgtgatcttatttggaaaaggggtctttgtagatgtggttaaattaaggattttgagatggggggattatcctgtattatctaggtaggtcctaaatgcagtcacactcatccttgtaagaggaaggaagagagagatggaaaacacagaagagaagacaatgtggtgatggaggcagagattggagtgaggtggccacaagccaaggactgctggcagctaccagcagccagaaaagtccaggaaccaattctctcttggagctccagagggagtgtggccctgctgacaccttagcttcaacctagtgatcctgattttggactttggccttcagaagtgtgagggaatgaatatctgttgttttaagccaccaagtttatggtcatttcctacagcagccacaggaatcaaaaacagtaagtatgtcccatgcaatgtttgtgacacacaccaaaaatattacttgttgttcacctgaaattcaaatttaactgggtctcctgtattttatttggccaacctagttcccaggcccaaagaaagaggcttttgaaatttgcaagaaagctggttggagctgtcagaaagtggactttgtaaacacagtaccaccgaaccaatttgaactgtactacctctagacaaaagagagggcagtcagacagttgttcgtgatttcttctttcaacagtcatttgagcacttactacaaaacagaagctatgtgtaagggtggaggcgttagctgttaatcaggacctccaggctaagtttctgtattagtccgttttcacgctgctgataaagacatacccgagactggggaatttacaaaagaaagaggtttaattggacttacagttccaagtggctggggaagcctcacaatcatggcagaaggcaaggaggagcaagccacatcttacatggatggcagcagacagacagggagagagagcttgtgcaggggaactcctctttttaaaaccatcagatctcgttagacttattcactatcaagagaacagcacagaaaagacctgcccccatgattcagttacttcccaccagatccctcccacaacatgtgggaattcaagatgagatttgttaccatatcagttaccaacccttccagataaatcacgtgaaatatcgccattaacagagtgagctcaggtggttcttcagtgcatttctgatacctgaaccttccctgggaatttcacagaccatcaggctctccaccctttgatagcaggatagcagggcccaggttctgcaggaggagatgttaccacaggcctgaaagggagggaggggcagatgctacaggaagatgctggctctggattcgctggaggagctttcaagggaagtagatacacactgtctccatcatttcatgtccatcacactctaaaatgctttggacaagaagcaaatgttaaagacaaatgtggcccattttcctgtacaaagagggctgctcccatgccaggctattggcactggtgggcatgaggcttctctgctgccctggccggggggttctctcactcaccattggctctctgacacctggagagaccaccacccttgggctttcatgatgctcacagaatccacactgttggagctttaaggagcctggatcaactggaacaggcagggagtactaggacagcccagcattgccccaaaatatccaggcctgataaaagagaaaaacaggtagctcacaggaaaaggataaaaaaaggaggagggatttaacatgaaaaggtgcttgatctccctcataataaaaagactgctgattccatccaggcaagtgacagaaaaaaaaaatttaatttaaaaagactgctgataaaaccacagcgagacactgctgctcagggatctgagggtgtgggcagccaggctgccacgcatcatgggtcggagaggaagaccacacccctggagcagagggcggctgatctgtcagatgccctttgacagcacctcagcttccaagaattaaccctttctatgtgagcagaggcatccatggggggacacactggtgaatcatctgttatgtagaagtctggaaaacatcaggatggaactggtgaaataagtgtggcctctgacggaatggagcggtccgtctgcactgctgcgggtgcccctcagatcctgtgggtcagtgagaaaagcagtgaggaacaaggcaggtactgtgtactgtcctctgcgtgcaaggaaggccagcgcatgcaacagagtccacacagacatagcctaactctggaaggaagaatgagaatgcagtttcagtggtggcctctggtggggagaaactgggtgaagggagatgtcatttccatttctctactattaattttgtattaccatgcttaaatgttactttttacctttttttttttttttgagacagggtctctctctgttgcccaggcaggagtgcagtggtacaatcatggttcactgcagcctgaacctcccaggctcaagcaatcctcccacctcagcctcctgagtagctgggactataggcacgcataccaccgtgcccagctattttttttaatcaagatggagtttttctatgttgcccaggctggtctcaagctcctggactcaagcaatcctcctgcctcagcctcccaaagggctgagattaaaacgtgagtcaccctgcccagccaattgctttttaaaaaagattaaatgcatgtatacgctcaggcatcagcacacttggaaaggatgaaaatatccggaagaagggttcttttaaaaggctcctcaagtgatgctggcaggcatgacgaatgtccctggtcacaaaagctctgatctggcctaaccctgtcatgttagagactggagtgcgtgtgtgtgcgcgcaaagtgtggggggatgggggtgagtgtgtgtggtgtgtaagcatgagtgtgtatgtgtgtggtgtgggggtgtgtgctgtgtgagcgtgtgtgagtctgtgtgtgtagtgtgtgtgtgaagtatgtggtgtgtatgtgtgacgtgaggtgtgtgtggtgtgtgagttgtgtatggtgtgtgcatgagcatgtgtgtgggcatgtgatgtgtgtgtggtgtgtaagcatgtgtgagtgtgtatgtttgagcatgtgtggtgtgttgtgatatgtgtgtggtgtgtgagcatgtgtgtgtgatgtgtctgtgtgtggtgtgtgtgagcatgtgtgttgtgtgtgtggtgcatgtgtgtggcgtgtgagcgtgtgtgtgcattgtgtctgtgagcatgtgtgagtgtgtgtgtgttcagcatatataaggcatgtaactgaacacagcactttagagggctctcctggagtcagagggggtgggtaggaggagaagggaggtgggctagtgtgctgaagtatctactccttgtcatagtctgtgacaacccagactagcccatgagccaccctgttccctgcatttccaatgagacctcggtggacatgttccctgaggtgaggctgactgatgtcatttgacgatcttgatgccaaatccttttatatcaaaaacaaccagaacactctcttttctcttagtgctttcacccagatgaccacatttcatcctcccagccactctgggccaggtggcactgctggtttgaaagggaggtctcccctggagtaacttccgtgggcggattcacaccctgcccacagtcctgtcccagtcagcccaccatggtggtctccggttcctccagaattcccgcttttcagctcatccccacattcccggagggactgagagcgcagccccagggccctgctctttgggggccgtctctacacccagagaagcagcaaggcattcctaggtttctctttcagatgcagaacttcagtgttcagagatgttcccactggtcctgagagggctcagttcagctttaatgactgcgctgttgcgtgtgctctgcagagggcgggtggcccagcgtggctgactgcagttttcctgacgtggagcccgagcctgccccgctgtttattaattaaggatcactctgcttgcagaaccctgaactccccagaactgtgaggtgggagaaccccgagaggccacctggccccacttcccacctgctgcccaaaccccctctctgccttcctgacagtcaccccaactcccagtgatccccatcaaccatctgacaaggggactgagagggaagagaaaggaggggcccaaagaggaaggtaaaactgtcgggaacagcccccaaatgtgtgacagccttcagtggagttgcccactttcccttttctcctccctgcaggacctcccttctccccagtcctccccaacttctgaggttacattgagaaaagtctgcagagaggtgccagcatcacaaggtgttaaggaccacgagtttggcattttaacagatgccagagccacttgagaaatgtggtaactaagcccagagaggtacagttaacctccccagagtcacacagcaggttcatggcaaagctggactagcacaggtgtccttcccctgcagatccccttctgtgccccacatcacctccctccagtgtctgggccacctggagatgggccctcagactcacccggccagaggtgccatctcatgggagaggtctggccaggaagcatcgatatttgagatcccaagaaatgaagacttggcctgtcagatgacagacttcggtcatgggaacacgtgatctgttttacacatgcgtcccctcagcagcagctttccagaacattcccactttcttctgtagtgagaagaactctttccctgcagcctcctgcccaactcctccttcagtgtctttgcttcagtgtctttgataaaccattctgctttgcagagtgcgagctctgccttgcagggttcgcatctgcctgtgctgagtaaccaacgctaaggtcgagtggtcggtcacctctcataagagctagggttgtctcatgctgatgactaggacttgccctcaaggagaaaaataaatcaaaacaaaagcaaaaacagcaaacatgcatctcttaaagaaggctctgagtccaggtaaatttccttccactgaagcagccaggctgaattcgaattatctttgcccctgcttaaaaactaatgcaaattttcctagagaatatccactaattcctggagggggcatgggcattcctgatgcccatgagaggaccatttgctcttccctcagtatgctaaataacagaagcgacatttgttgctggaaagtatcagtgaagttaataaggtttttcttgcccagggtgagggaacagttcccaatgacaaatgctgtatgggaaggggctgtagaactgccagcccctttggtccatccgtaaagtgaactctgtggatcctggaggattccagcgtctttttttttttttctttttttttaagacagagccttgctgtcacccaggctggagtgcagtggcacgatctcagttcactgcaacctccgcctcccgggttcaagcgattctcatgtctcggcctcccgagcagcaagactacaggtgcgcaccaccatgcccgactaatttttgtattattagtagagacgggggtttcactctgttggccaggctggtctcaaactcctgacctcaggtgatccacccgcctcagcctcccaaagtgctgggattacaggcatgagccaccatgcccagccagcatctttcatttttctgtctgctttggccctttcctctctcactgtcttccttttccatttccaaagtcagtccatctcactattagcacaaaaactgctagagcgcttgtcattggtcatctctccctgcacctggctggtctgttcttggccactgaagcgtttcccccagctgttgctttaatcattttattgttattatgccttacttaagaaatggatatgagatgcatttacctgtctcttcctgccactctgcagagccagtaagatgtggtggaaagggcccaggctttggaggagggctggctggggttggatcttggctgccccctactagctgtgtgaccttgggtaagtagctggacctctctgagcctggttcggaatcatagcacctctctttcagggctgctgtaaggaatagcagtggtgtgtataaagcagagcgcacagccagcaactggcccctagccacactgctgagcacctactgtgataagctgccattgtggtgtgtgaagcaaaggggaaacatgcctgctgtagtgagcttcctgtagggcaggttgtagaaccagaggtgggttccaaggttacaaagggactcttagtgtattagtctgttctcacattactataaagacctacctgagactggatcatttataaagaaaagaggtttaattggctcacattggctgggtgcggtggctcacgcctgtaatcccagcattttgggaggccaaggccggcggatcacttgaggtcaggaatttgagaccagcctggccaacatggtgaaaccctgtctcttctaaaataaaatacaaaaattagctggccatggtggtgtgcgcctggaatcccagctactcaggaggctgaggtggaagaattgcttgagcccgggaggtggaggttgcagtgagccaagatcgccccactgcactctagcctgggcagcagactgagactctgtctcaataaaaaaaaaaaaaaagaaaagaaaaagaattgcaagaaataaattattgtttatgagctatatggtctgtggtaccttgttgtgggactgggagtcttggcgtctccctgaccctgcctgttgctgcagcaccgctcagccctgcctgctccctacctgcctcccctcggcctctcctgcctccaccgggcccctggtgcctcctctagagacagtcctcctgggaccgattgtgttctcacttacacgaggcatccaggactacagataaccagaggaaggggcgccccccccgcctgccctcctccctggcatcctcacgctgcagaggtcagagcctcatcccagccccttacctgcccctactctgtggagaaccgtggtcagttcgccaggccggatccacgaacggccttgtggaagatggtgagctcacacccagagctggctccgatgaccctgtctcctttacatgtttctaccttcccctccctaccttcccccactgctgggcgcagagtggaggcagatgaggtttaaagctcagaagggcttaaacgggttggggcgcagtggctcatgcctgtaatcccggcactttgggaggccaaggcagaggatcacttgagcccaggagttcgagaccaacctgagcaacatagtgagaccgcgtctctacaaaaaataaaataaataaaattagctttgcagggtggcatgcacctgcagtccctgctactcagaaggctgaggtgggaggatcgcttgtgcccaggagtttgaggctgcagtgagctatgctggcaccacagcactccagcctgagtaacagaatgagatcctgtctcaaaacaaacaaacaaacaaacaaaagaaggcttaaagggggctccaggtgggcttggcagcacaaagctatgaagttctatcttagacacaagttctgttactgggcctttgcaggctggcctgggtacctggctgccatagacagggaaccttccagatgagctgcaggcgtggagcacaggagccagggtgctcttcctgggctctgtccacaggcagaacgtacacagtctttgtacacgtccggcggctctggtgcctatttttgtttgtgtttttcttttgtttggggggatggatttggtttcccccgagccctctgtcctcctgtcacctggctggtgctcggcaatgttgaccagctgcctggctggagttggcagtggctaaggctgtgacagctaacatgttcctgagtcctctcatttcttcaccataatgccctgttgagtttgcagatactgtctctgtttttatctcccggggaaactgaggctcagagtggctaggccaccttcccatggtccctcagctcatgagggccacacagggcattgcggtggccttctcctcagccttgaccctccggccccagcattgctgcctcaaggggtctcctctgctgagccgtgcaccttctgcctggcagctccaactctgtggctgtgttcagtggctcagcactgccccttgaccctccctggccttctgcggatgccagactggagcactctgacaaggtctggggtggttgtatgggtcctgtgacctctatacacctcccagtgcctgggaatcctgcagatacaccctccttagccgtccctaaccatagaggacatttctgaggtccccgagagagtggggcacccctgcaggatccaactgctgggcccaggaaggatagcagcagcatgaggggttccattagccacaaactcacggcatggaaccttcacccacctcgcccctcatctgctgtttagcacctggcacgccgtgtatacttactgattattacattttaatggcaaattatagtggcaaacgtatgcatctttgcacaattgttgtacagcatgatgaacaagtcattaatagtaaagaataaatgtgaaagtgagaaaaatctgactgccaaagtttttactccttccttccctccccagacttttaaatgaaagtttagggataatcccttagttgtcctgctagtaggacttgcaattaaaagaattgggccaagaacacttctacgcttctccttttaggtttgggtgtaaattcggggtatttctcactgatgaaagcctggtgcagggcagaccgtgggaagctttcatttccggaatggaccatcaacatcccttggagaagaattctcttctccagacccagacctggtgtcctggcacccattgggcaagtgggtcctagaagacaaacctggtcagagcctggaggctgcttagcattccccacgcacattagcagctcggagagctcaggaagccgcagcccctccttgcctcaccagcctggatcaggacagcatcccctggaagacacacagggcctggcctctgattacccagcctggagggaaagctcaatcgagcatcatgtcacccggtgcccccatgcagggtggcactggtgagacccccaagccaatgataccacctcacaggagtgcaggcccattgtggccagatcatcttgacttttcaagataaatcagaaatcgtatttccatgagatatccctatttgcaagtgatggtgactaaattagaagtttttgaatattgtaacatgttcgtaggctgtttgtctggtttaaactctatctggaggaattcaagctagacttcaggaataacttcttgaggcaaggattttgagaccttagggaaagaaggacgtcttgggggtattctgactgttgtcctcctggaagggaagaacagagaactagaagactgcccttagcgaagttcaaagcacctaagcccgggaccctcagcaagtgttcttgagtcacagattctccctgaggcgcctctttctggctccatagaatggctgattctgtaactcggtgagtttgctttttttttttcctccatcacccaggctggagtgcagtgaagctggagtgccgtggagcgatcactgcaacctctgtctcccaggttcaagcaattctccttcctcagcctcccaagtagctgggattacaagcatgcagcaccacacctggctaatttttgtgtttttaatagagacggcccgaagtgctaggattacaggcatgagccaccgcggccagccataactctgtgactcttgttacaaaggccttatattttgctctttgagggtggttttggtttgatgcctgttggttgccatcttttaactagggatgttttatcaaaatgcccagccaaagtgtccaaacaaattataccttaaagtttgaaaatgtctggcacttctaattcaatgcctgttgtgccaggcactgggctgctgaggaactgagtcccgtccctgcaggctagctagagaacacacacacacacacacacacacacacacacagagtggtcttacaagtcagttttatattctacctatatgcaataaaggtattattatgttgaggtgccttgatataaaaatttttcttaaaggagaggatgcctaaaacaggcattacctgaaacctcctctctccagcattggttgtcttctgtcatgactcagggttttcactgagaatgggatggaaatgtggtctaaagatagggccaatgttgggactggatcccctctgggaagtcagaccaggctagggcaggtccttgaagccatcaggaaaagcctctggagccagaaacaaaacaaaaaaaaaatggtgttaactaaactcagtctcaaatcctgaataggactcaagtcaagcaaaataattaaaggagttagcaaagggcaagtcagagagaccgagcaacaccaatgtcttccgggagccctgtggcgagtgacagagcctggactctggagtagaactcatcttgtgtcttcttctgccactcgttagctgggtgaccttgagccaagccccttaacctcttggaccctatgttcttatctctaagtaggggctggtaatatcttcccctttgaggaatgccctctaaggggtgttgtgaagattcggtaaggtggcaggggtaggactcctggccagaaacaggcacataataaatgctaagtctctccttctctccacctgctggatgctgtagatactaaggatttcgatgtgaatgagacaaaacccctgccttccaggagcctttgagaatcagagaactagacccatttccagaacaaggggatgcagggtctggataaagttttggggatcaatagagcagagggctcccagaggatcccatagggttgactcctaactcaagggcatgagacaacccccaggaagggcaccctggaaggggtccggctgtccctgatttacttgtgggcactgggggaatgcccggagccatccagccctcagggctctgtgtgattctgggttcctcccataaaagataatcagattctttcacgttaatgtctttctccacctcattgcacatcatgcagctattcattgactcagcaagtatcagctttgcatgcgaccttggcctacccactttagcttttagtaatagctcccttcttgaataatacaaccagtggggaaacagaacctaactcttacctctgggaggcttatttgctttgagaacatatgtcctgcagttttgttcatatggcagtgaagtttcgtgcacacactctagagccaggcagcctgggttcaaagcgcagctctgccaggtcctaactgcatgaatttgggcaagtcgctcaacctctccatgcctgagtttcctcatctgtaagattggagcaatggtaatacctgctttttagggttgagaagagaattaaatgaattaagatgggtaaagtgcttagagtggagctttgcaagtagtaagtgctatgtaagtgttcgatttaaaatgaaagacccttaaatacattctttgttcatttcacaagcccttcatttcacaaccttacatttcacaaccaagctctgtctcccctggaatccagccataactctgctcacaagtgtgagacaggccccagcagagctgcacgaagaggagagaaggcagccccccagactcccaaccccctgtccaagatggcaaaaccagaacacagcctctgtaccaccccagcaggtattcagaatctgcaatctccaaagcccacttcaattgtaaatgtagagccacgtgcgctttaagtcacctgtcactctggaggctcttttgctcagttcctcaccattagcagggatgacagggagtgcaggagtgcggtcgactcccagatattggagagcgctgggctagctgcccattctcccggcctccactcctctttgctgtccagccatcacttgctctttgaaggcaaacaaaacagaaaacagtgccaaaagtatgggaagaaagccagcttctcccctggggtgcctgtgatgccatgcccaccctccctgaccacgcagcccctgtggaccctcagggccccaagcccccatttccatcacatgcgtacacccatgtgtgtccatagccgcccatctcagtcaataaggctgctcctgcccacttggaatagtggtgacaaccaggagtggcttatgggaactatcccaatggcctgacagcatgtccgctgcaaaccgctgaggtaggacactgccctcatgtctagctgatcagcaagaggcgcagttgctttcttaggtaacattgctgctgtgtcctggccattgctggggggtggcacttaatctacaccagatttttccctcctgtatcttccaagctgcttggatcttggtgctgaattaggttggactttgtcttgtggggaagggaggactatagaccctcaacgtaagcaatggtcagactattctaagaaaactcgccgaattaaagcatgaggtaaatttagttctgacttctgtccaccccactgccactgtccccttttatcccatgatcccttgcttttcttttcctcctctctccctatctcttgtgtttgacgcatgataggaattcagaaatatatgtttgtggatttgtttattcacgtagcaaaccatttcttgagtgcctaccatgggccaggtagaatgggcggccccgggctgcagtggtttcttcagcccctctccagggtttacactgtgcaagacggtttgtgatgggtcctcccatcgaggaccacactcttctttctctgtgccccttggtcctcagtctctgaccccacttcaaaggcagcattcactcagggaagctcccatacaatgctagtcagagtaaaagtttggacaaattgccaggaagcagcttgtcagtatgcataaacagcctttaaaatattactactctttgacccagaatttcacttctaggaatctgtcctaaggaagtagtcacatgcaaaagatttatgtaccaagatgttcatcaaagtgttgttttataacaggaagtctcagaagctggataaatatccaacctctggaaatggttagatagaatagtatgtagccattagaaaattatgtctatggggtttaaaatgtcatgggaaaacacttctgacataaaagagcatgagaactgtatatttagcataatcttaactatgttttagaatgcacaggaaaaaaatgtacaaacatattcatagtgatgtctctggtggtaggattatgatcagtaagtacttctgtctcttcatattttcctgtatttgataatacatgcatatgttgtttttaaaataagaaaaattttaagtttaaaattggagctgaaaagtgtttttaggtcaggcgaggtggctcacacctgtaatagcaccactttgggaggctgaggcagtcagatcacttgagcccaggagttcgagaccagcctggccaacatggtgaaaccccatctctactaaaaataaaaaaattagccatgtgtggtggcacacatctgtaatcccagctacttgggaggctgaggcatgagaattgcttgaacccaggaggtggaggttgcagtgagccaagatcgtgccactgcactctagtctgggcaacagagtaagactctatgtcaaagaaaaaaaaaaaagaaaagcctttttaaacagtagcagacataactatataatccttactaagctgtcggtcaaatttttatttatatatttattttattcatttattatttttagacagggtctcactctgttgcccaggctggagtacagtggcgtgatcatggctctcttcaaacttgacctcccgggctcaagtgatcctcccatcttagcctcccaagtagatgggaccacaggtgcataccaccacacctggctaattttttttattttttatttttagagatggtgtttactatgttgcccaggctagtctcaaactcctgggctcaagctatcctcccacctcggcctcccgaagtgctggggttaccagcatgagccactgtacccagccctcaaatttttaaaaatctataagagacattattggacaattagagaaattcacatatggacttataatagtatcagagtgtgtggtgtgatggttctggagggaatggactttttctttggagacaggcttttctatgcccacccttttatcttgctaacttatcatcatccaggttccagcagaaacattacttcccccaggaaatttcttaagggtgcagtatcatgatgtctgcagcaaattctcaaatagctcaggaaaaaagtacgtgtgtggtatgagtgtgtgtatgtatgtgtgtatatatatacacatatatacacatatatatacatatatgtgtatatatatacatatatgtgtatatatatacacacacatacacatatatatacacacacacatacatacatgtatttttatataattatatatgcagagagtgcaaatgttgccaagttaaagattggtgagtctaggtgaagggaatatggtatttattgtattatttgtgcaacttttcttaagtttgaaaattttcaaaacaaaaaattggaggaagaaggcatgccagtctaccccaagccctccattggaatgctgaaaatctaaacaatgtgatttggcaatttcatttcttttctgttgtgggccagtagtccttagatgttggggaagggggtagtcgctgaggtgtggttgacttaggatggaagaagcagaagtcaagactcccagggtcaaagtggtttgctctgctgacccaagtgtgggaggcccagagtcagcgtttcaggtgtgctaattcagcatggttctattcacggccaaagtccaccctgggcacctctctggcagcaatcttgggtgactctactaaggccaggcctccatgaccctatgtctggatcccatatctccacctctcccactgtctcaggaacggtgcttagctttttcttttccctctcctgtcttctttgccagcatgtagaaagtttaaataattcccctctttacaacaaaacaaaacatacccccttcagtcaaccaccctagctctcttctccttttcccagccagatttttttaaaagcatcctaggccaggcgcggtgactcacgcctgtaattccagcactttgggaggccaaggtgggtggatcacaaggtcaggagatcgagaccatcctggctaacatggtgaaaccccatctctactaaaaatacaaaaaagtagccgggagtggtggcaggtgcctgtagtcccagctactcgggaggctgaggcaggagaatggcgtgaacctggtaggcggaggttgcagtgagccgagatggcgccactgcactccagcctgggtgacagagtgagactccgtctcaggaaaaaaaaaaaaaaaaaaaaaaaaagcatcctcagcactttggcaactccatctcctcccaacatgtccctgttactggaatccagccaggactcagccccgatctttctactctaaccagttgtctcagttaacaaggacaggtttatgctgcagtgacaaacaagatcccaaattcttgtggcttcacacatctggcaccacctcatcttccagccttaggagtcatcttttagttccttgaaaactctttacagttttctgttggggccttgtcatatactattcccctggaatgttctttcctatcccctccctttcaccttgctaacttgtgcccatccttcaggtctcagcagaaacatcacttccttggggaagttttctccaacacccacactacacaggtgtcccatctacactcctatgactttgtggtacttgtctcacttcattttccactgccttccccacaaggcacctgcacaagggcaaggaccgtaccactgtacctatgtcactcattgctgtggtcacctgcactctggctgcctaccttaactacacattagaatcacctgaggagcttttaaagccacaatgcaagactccaccctaggccaattggatccaaatccctggggtagggccagacatcagtggagttatatatacatatatatattttgtttgtttgtttgtttgttttttgagacagagttttgctctgtcacccaggctggagtgcagtggcgcgatcttggctcactgcaagctccgcctctcgggttcacaccattctcctgcctcagcctcctgagtggctggaactacaagtgctcgccaccacgcccagctaatttttttgtgtttttagtagagatggggtttcaccgtgttagccaggatggtctcgatctcctgacctcatgatctgcctgcctcatcagcctcccagagtgctgggattacaggcatgagccactgcacccggccatcagtggatatatttttaaagcactgcagagaattctgttgcatcagcttgagaaccactgatctgccttgtgcttcacatttaaaacttttttttaatgaataaataaaccccaaaaaattaatctccctaagcctccctagaagataggatggtaaggatattttcctaggtaaaaatatgttaatttcatatttcatgaaatttcatgtttcatttcaatcaagctctgtcatacaccttacatggggcaagcccagtgcctgggcagggtgtaattatactcattacacaggcaaggaaaagtcacattaggtgatggagcacaaataggcagttaatggtttcagggctagttaggatatgtttgtctttcaattgcaagtaatagaagcccaaagaaattggttatttatataatataattgattggttcccaaatttgaaaaattcaggaatagacccagcttaggtacagctggatccagtcactcaaacaatgtcacaaagaaccctttgacaggaatgtatcctgtgttgactctactttgctctgagtagtctttccccaggtgatgataaaaatggtcatcatcgccaggcttgtgtcctgtttagtaggaatatacaagaagagctcagtaaatgctggccccaccactaagcaaaaacaaaacttttgttgttgttattgttgttttaaataacagcttagacctttcttctttccttgttattctctttcatctgtaatccagttttctacttctgaagtatagaatgttctgatgatttattcttcattacccacaacttgcacatgtttatttaaaaatgccaggattgcctggccgttgtgtgctgttaacctttgtttgctgttagtggatccctgaagttcaggctcccaggggagcagataatgggtatccagttcctgcaatatccaccctctggcaagccaagttccttcctgggtaaggttttgcctacctgcattcctagggaagtttctgggcctgaccaccaagccagctctgagaaggggtgcataagccccaccatgctttggctctgtccctatagaatattttatgttgttactgaaaactaaaggaagatgggtgcggtggctcatgcctgtaatcccagcactttgggaggccaagacagattgatcactcgatgccaggagttcaagaccagcctggccaacatggtgaaaccttgtctctacaaaaacaaaacaaaacaaaaattagccgggtatggtggcatgcacctgtggtaccagctactcaagaggctgaggcacaagaatctcttgaacctgggaggtagaggttgcagtgagccgagatcgcactactgcattccagcctgggtgacagagcaagattctgtctccaaaaaaaaaaaaaaaaagaaaaggaaagctaaaggagagagactaaaatgatatcaggttcctggagaacaaacagacatgattttgcttcatggcaggacagccggaagaagtgggattatatcctcacattacaaataagaaaactgagactcagaatggttaagtcacttgtcccaggccacacagccagtaaattacagaaacagaatttgaacccaaatcttccagctccaaagcttgtgttcttttcactacctcctgcttaattttttaatttctaagattagacccttcatctatccatgacacctgcctgtcatcccctgaaaaaaggtgaacgccgttcagaaatttttctagcctgagctcactcccagttcacttatttttgctttgtcatggctgcccagtccccacttgtagaccaggaataggtcatggctgcggggactacacgctgtcgctgctgcaagggccggcctctgtttccggggctgagtgggggccagacctgccaggagcaccatcttctgtgggtcctgcctggatgtcacatcccggccccaagaagtcactgcaaaccttcgtattattgagcttcacatcctagaatttgctgtcactgtggctgctgcatgaagttgtcctgagagaaacgggcattgtcattaacagggaaattgatggtctgggggaaaagtcatcctcattctcttgcagatctatgggtgattgagactggctgatgttgaaggggtttctcagccatcgtgtgccatgttatggaacagtggtgtagccagccatttgacacccagcgctgacctttgtttaacaacctcacctatatatgacaaaatgattgtcagaaataatcgtgtaatgaaatgactgtaataatggccagaaaagaaacgcagatagtaaaatgtttctcttgttgaactctgtacatataattgcaccaggatttttttcaaataaaaagtaaatattatactacaaaaaagggaaaaagcacaagcatttattaaatagctttctatatctttctgagttttgatcctttgattgcagactgatgtaatattttatgtaaatcattgcttggttactaagtgaactttaagaaaagtgagacgtctgcagaagttgcccataatttagcagctactgtattgtaccattgatgtacggctttattttcttgattaattatttaaacaatataattcacaattttaaaataataaatttccacttaaaatggtatttaaactcagcaaaatatatcatctatgagtaaaatttgtatttaccaagcaaaaatattacagtttgtggttcacatgctgtctcactgttttaaattttaaatacaaaaactccaagtaggctgggtgtggtggctcacacctgtaatcccagtactttgggaggctgaggcaggcatatcgcttgagttcaggagttcaagatttgcctgggcaacatagtgagatcctgtctctactgaaaacaattagctgggtgtggtggcacatgcctgcggtcccagctactcaggaggctgagataggaggatcacttgaaccctgggggacagaggttgcagtgaggcaagattgcaccactgcactccagcctgggtgacagattgagaccctgtctcaaaaaaagaaaaaaaaaaaagaaacacaaaaactccaggtggtcgcacagaatgacaggactgaagtaacttagctccaatttctgtcttcataatcactgtcctaccattgtctgtgcttagaatctacttgcttaatgcaggaacatgtgttctcacagagatggaaaatgcaaatggcgccagaagcaagctggaaattctgaaccattaagaatttactctctgccaggcacggtggctcacgcctgtaatcccaggactttgggaggctgaggcaggcagatcatctgaggtcaggagttcaagaccagcctggccaacatggtgaaacttcatctctacaaaaatacaaaaattagccaggcatgatggtgggtgcctgtaatcccagctactcgggaggctgaggcaggagaatcgcttgcacctgagaggtggaggttgcagtgagccgagatctatctgcaccattgcacttcagcctgggagacagagtaagactccatctcaaaaaaaaaaaaaaaaaaaaagaacttactctcaaaataaatacgtgtggctgactccacatatggtagggccaactgtataactagaagttctccaaataacttctgtggagaaaaaaaagtttattaaaggttaacttttttaaagtgctaactagaaccttactaacactgagatcgcaccaattgtttataacttagacagggccgggtgcagtggctcatgcctataatcccaacactttgggaggccgaggcaggtggatcacttgatgtcaggagttcgagaccagcctaaccaacatgatgaaaccccatctctactaaaaatacaaaaattagccaggcacggtggtacacgcctgtaatcccagctactggggagggtgaggcaggagaatctcttgaacccaggaggcggagattgcagtgggccaagatcgcaccattgcactctagccccagcaacaagagtgaaactctgtttcaaacaaacaaacaaaaaaaaaaacctcttggaccaggaaaatattttttaagggaggagtattttatcactggcattgtttaggattgcaggcacatgatgctaatgaaaagcagactaactattagttggttttattactgtttttgaactctctctctcccttttttttttttttgagacagagtctctctctctgtcacccaggctggaatgcagtgactgcagtctcagctcactacatcctctgcctcctcagttcaagtgattctcgtgcctcagcctcccgagtagctgggattacagggcaccacaccaggctaagtttttgtatttttagtagaggcagggtttcaccatgttgcccaggctggtctcaaactcctggcctcaagcgatctgcccatcttgacctcccaaagtgttgggattacaggcgtgagccaccgtgcctagccctgtttttgaactctctagagacagtccagccccttattacttgtcctgaggcagctgctcccttcacctggccccccgcattgtgttccggacccttgtcctggtggtgctaaagaatatctctgtcgatcctttggggactggggaaactgaggcccagtgccacgcgatgccatttgttcagggaagattaggtcatctgctaggtccccagtcacttgaccttcttcccagacaggaagaagctgctctgggtctctcagtgctccacgtgtctttgcacattgaaatgttttctgatttttttttttttttttttgctgttacatttacttttaaaaaataacaagcaataaaatgttacatttgagaaggttgaaatgagaattgatttgagttaaattctagcagatttttcttagaagaatgatatcatcatctccagctacctgcaattgatctactctgaattaagaaagagacttccatttgttgtttatattttgcactcttgatgtgtttctttaaattatggtcatgggccaggtgtaggagctcacacctgtaatcccagcaccttgggactctgaggagggaggatcactggaggccaggagttcaagacctcgtctgtacagtaaattttaaaaattagccaggcatggtagcattcacctgtagtcttagctacttgggaggctgagatgggaggattgcttgagccagaactttgaggctacagtgagttattttcacgccactgccctctagcctggctgacagagcaagacctgcctcaaaaaaataagtaaaaaataaattaaatttcaatcattagcagtcattaggatatttaaatacagtatgttgaatcaaagttacgcatgtgtgtatttttttttccagagagttgtttatcatgtgggttttaatttaactttaaaaaaatgttggctggacagttgcccaaatggtatcatcagccatttggttgagaacgtatgtcctgcgggctcctctgtcactggagttttgctagctgacagccactggctagttagagactgcagtcagcacagatgcaggcgtggacttgcgcacgtaaccatgtcaatgcaaagccatcacttcttaaaaattctgaaccctgctgtctgagatggtggtgcagcggatagaactctgctctaagaggcagtagctaattccatgtcttctttgcccttgactagctgagtgactttgcacatggggcttgcctctctgttgccttgtctgcaaagtggaatcatcttttccttgctagacagaaggtggaccctggacctatggcctttttgagtttcccccccgcttcttagaaggacctctgatcctactgagtttaatacccacgggttaataattgggaaaagcaaaggaagcgcttctgtttaggtaattatatgcatgtttttgtctttttctggctggaaagatatccaagccactgggaaggtccgtggctacccagggtagccctctctggggagggctgctatatccaagagcccctcatgagaatttgaaaatcgaccatggtagggcctgctgacttttgacagctaatggtgtgctgagaattgtccctccaaagatgcctttccattccctcgggagagtctgggcagcccctactgggggctgggatgctggctcttccctcagcctccaccccaactgctctcttccctcctcccctccccagccccctaatttctctcacaaggctttgttctgcagcaacctttcctaatgcagtcctggcctcttcgcagcttcattacataaccttccgtggactcctggtccaaggatcaccccagaaagccagtcagaggtaggcacgcagctggggtccatttacttaccttccccaccccctcggaactcagaggtggtgcaggaatttggactccaagaattaacagctccaccaccatcaccagagccaaaactcaggatgcatgtgcttcatctgctgcttatttccagctgagagccagtggtgccatggttccttagggagccggtcccctgatgccggctcctggccccaaatctctctgatccgggctcttccagaatgtcttgtctccaccatcgcctttgaccaatggtgtccctttgcctggtaatgtcccctttgcctgatgatggccctgtcactcctctctttagcacagaggaggctgtttcatcccttcaagcctgccctcccttcaagtcttagctcaagttcaccttctccgcagagccttctccaatcttcttgactacgtctcctctcagctccagcaacctctgtctctggcactgattccttacttagctaagagaatcacagacacttggggctcaggacaatctgctttctctcttcttacccatggccttggactgtgtgtacctctttgtctccactcccaaacccaacccccagagggcagagagcatgttgtctgtccctttgctcagcatgaagccatgcgtgtggtagatcggcagagttccataacttgtgttgaccgaggggtcactttgctctgaaattacccctgtgtccttcagtatttgcacagatagcttcctggccagaccgaatatatccaagggcatggcccacctctgctcctgtttccaggtccctggtgggggttagttcatgccttcctcataatctgcccactggcctggtcctcaaggtcttcccaactgctcagccagagttgagaaaatgggtcgctccatcctgtttgtgtcgttctctccttcctggcccactctcctgcccacaggtatccaggggctgcctgtagcattagaggacatacatgcacatgcgtgggcatgggacactcacgtagcctccaagcacagcatcaataatgcattctgtgctttatagcatggaaagctgctctaaactttattacacagtggacatgtctgaagcagctcccaaatccacccctgagtgtgttggaattggcaagcctatcacttgggagtctagtttttttgttcgttaataatagatgcttcctgtggccccagcttggcaattttgatttaaagtgatcttaactgaagagactaatggacgggtctgaatttgtgccttttaagcacaaagtattgctcttaattaactggattctatcctttgagcaggcagaggccttcccccaagggcgtcattaacgatccacatctggacatcttccaaagccttcttctgtttcaggccaaccgcaggtgtgttcctgaacacccaggaggctatgagagccacatatgcctcccaaatacacacagtgtgcatgcccagggacatagagcagtgtgcaaagtcccattccatctctctccacctgggagaggatggctcttctgtctgattcatggctcaaagtggtaaaggagctccccactccccgtcccacgcctactcagagtctgcaaatatgtatgcgatatgagagctcgtcagttagctgtcttcagtgtggcgcacatttgaggagtctgactcccctccagcacaggccaatgtgcactgctctcctatctttgtacccccactgttgcactgtgcagaggttggagccatagaagtaccagagctgtgaaaggagaggccccctctcacctctgccctggtctccatccccactttctctaggaagctagtaggtgctgacaggggagagaagggaggggaggggtccagaaacagtggctcatgcctgcaatcctagcactttgggaggctgaggcaggaggatcatttgaggtcaggagtttgagaccagcctgggcaatgtagcaagaccctatctctacaaaaagaaaaaatgtaattagctgggtgtggtggtgggcacctgtagtcctagctacttgggaggatgaggtgggaggattgcttgagcccaagagtttgaggttacagtaagctgtgattgcaccactgcactccagcctgggcaacagagctgagaccctatctcaaaaaaagaaaaaaaaaaagaaaggagagagagagaaagaaaagaaaagaaaaaaaaaaaagaagggaagggaaagcccagaagagtgtggggagaggaggcggccgtcattctggggccctcagtgtgcacaaccagataacacatgctctgtgggcttttgtaccattttgcttgagcataaagaaaggaaggctgcccctaaatagaaagcactctggaggcaaacaaatctgactccaatcctggccctgccactttcccagctgaggacttagacaagcaccctagcctcttggacattctcagagccatctgctgcaagtgggtgctgccatacccaccttactgggcaggcttgggggaccaagggtggtaaatggctcagtctttcatgatgcggccacacagcaggtgcgccatccaggtccatttctttccttcctttcccccaaatcaagttgtcattaaagtactagtccacattaatgaaatcaactgtattaattttctatttgctgctataataaatcatcagaaatttagtggcttaaaccaacacaaatgtattaccttacagttctggaggccagaagccctccataggtgtcactgggctgaaatcaaggttttggcaaggttgcggtcctttctggagggtccaggggagaatccattttcttcctttttccagcttctaaaggtttcatgcattccttggctcatgatcttctatagctatagtcagaaaaattttccatcaatcatcttcaaagccagcaatggcaggatgagtcctcacatcaccttgctctgacaccagttctctgcctccctcttccacatgtcaggaccctcatgattactttgggctcactctgataatctgggatgatctctctattttagagtcagctgactgggaaccttaattccatctacaaccccaattcctctttgccatgtacagtgacatattcacaggttctggggattaggacgagcctgtctctgaaaggctactttacatgaaaattcatttttttaattaagatttttttttcctcttgagacaaggtctcactctatggttcaggctggagtgcagtggtatgatcacagctcactgcagcctcgacgtctctgggctcaggtgatcctcccacctcagcttccctagtagctggaactacaggggtgagcccccatgcccagctaatttttttttttttttttttttgagacagagtctcactcagtcacccaggctggtgtgcagtggtgcaatctcagctcacagcaacctccgcctcctgggttcaagtgattcttgtgcctcagcctcccaaggagctgggactacaggtgtgcaccaccacgcccgactaatttttgtatttttagtaaagatggggtttcaccatgttggccaggctggtctcaaactcctgatctcaagtgatccaccaacctcagcctctcaaagtgctgggattacaggtgtaagccaacatgcccggccccagctaatttttaaatattttttttgtagagatggggttttaccattttgtctaggctggtcttgaactcctgggctcaagcaaacctcccaccttggtctcccaaagtgctgggattacagcatgagccactgcactcggccttaagagaagatttaataattaatactttacaacaagatctggaagaggtgggatgagtaactaaatgaggatacaagtaacccgggtcatatttgctaatacccttggtcacattgaacttgatatcttatcagattttcctaatcagctcctttagcagcagtgttgcagcatcttatctcattttgttttttgtttttttgcctagcacatgcctgtaaatcactggattgaggtgtttagatgtttgttgtcctttggatgcttcttataaatccatatttcatggctccctggaaagtgctatgcaaatgataagctgcaaggatggaaaggaaattgcagtgctcctgaattgtaaatgggcttttacgaggaggtttctaattactcgctctttctcttgaactgaggagttgaagtgtaggtggcagatccataacagataatcatgtgtgtgatgtgacttcagcctgagcgtcgaggaccaagtcacagagcaggaacagccactctccagtgtccttggggctacgtctgaggagaacctgggatttcatatatgacctgcactggctggggggctctcttgacgtaacgtgttccctctgagcatgttacagattctgacattcttatgttccttctgtggagagacatgtacttagtgacctaactcactttagcatatttttgctcatcgtttgtgtagcttaaaggaatcagataattaccccctccccactactttcggaagcacaaatgcaatgccctagaattgtactggggactcaaaaagaaaagagagtagtaaaatctattaaaggggacaaagacagcctatatactacaagctttctatttttatggcagagaatgccattttctaagtaaacagagaactgcatttgacctgcaatatcaaatgcatggatttgatgctttggaaagcaactgttttctgcgttaatctgggtgtcttccgtgaaatgtcctcctgcctttggcttaaacactagctttgtctacagccattccatcctgaacctgcccaatcttgtctgaatcctggtttcaccactgacaagctgtgtgtccttgggcaagttacttcacctgtctgtgcttcagagtcctcatctgtgagttggggaatctggacagaatctaccccatagggcgtagtgaggatgtgttgaattatcccaagtggctacacagagtaagcactcaaatgatgtcatcgttgtcatgattgctgttaccagagcctagagttcattctgatactcgagtctgtggcccatccagcccaggtaaggaatagttggaggagttgggcatgttcagcttgaagaggagacgacaggggatatgggatagttgaatctgtgaagggccccctgggatgaagaactggcatgttctgtgtggctccagggcactgagcaggacccatttgccaaagtctcagggacacagtttctagctatagacagaaaaattttctgtcactcagaggatgaaaatagaatgagcccccttaagaggtaatgagctccctgtcattggaaggattccagaagagctaggtaaccactttaggtgctatcaaggggcttttttctttaaagtcctttccaaaagcttctgagattgcataaacaataggaagccatcttggtgctttaacacaaactctccccagtgatgagggttgagccaaagccagattggcaagcagagaggagacttgtgtacaaggagttcctcgagtcaattgctttttccttgttctagccagccagagggctcctgttggaaaacaggagaccggagaggctgaggcctgaccaaaccagcttctgcaggccagctgggaggccacaactcctacctacgggaaaactgaagggcatctctatttttagattagcaaaagaaaataaatttaagtttgagtctcctttgcaacttttaaaagacatctttattgagatgatcattcacattctataaaattcccccactttgagttacaattcagtggttttagtcttccttgatgattttgatggtcttttcttaaggctcttggaagacccagaagcctctcagacacaggtgggtgtggagggcgtagcacagaggcagacttctcatttcctgggtctcccctttaatgactctcagagacccctccttccccctgcccctggcttctaccccaggggtgtagagttttgccattttccaagcagaacttcatttcctcttctgtgtctacactctttgtgcttctttcttgccagctttttctcctttgcccgcccttccttccttccttccctccctccctccttccctccttccctctttccctccttccccccttccacccttccccccttccccccttccctccttccttccttccctccttccttccttccttcctgccttccttccttcctgccttccttccttcctgccttccttccttccttccttccttccttccttccttcctggtatgtgactaatttctgtttcaggacataaatgttgtccaggctgttctttggtctttctgttggataatggacatttggcattgagagaggctgctttttctgaaatcatgttcttggggcccagaacctaggtgtgtgcttctgactttgttttcttcctgatccaaattctgatatgtccatttaaattgatctagacccacagggcactgtgggacagatcctcagtggaacatgactctgtaacgagagcattttgttttgtcaaaatgagaacatattattgcctttcatctgattgtaaacataatacatgtttataaaacagtataatgagacaaaaatgtagacactaataagggaaaatctccctaattgtatttctcttcacagagaaagcccctgttgggcatatatactctagtttgtttatttgtttgactacacatatatgtattcttttcttatgtataaaaattctgaacatgcacatttctgcaactactgttttcacttgatgatgcatggacctctctagagtgtacgtttcttcttccttacaaagcagttggcttcgcccagggtacaccaggacacggttttggctctgtccccagggtgtcacgggaccaggggatgatctcacagggtctgccatctgccctgcctggccggaggctgcatcgagagggccaaggggcaccacgtgtcgtgggtactgtcaaacaagagccttcagagccttccacagtctttcttttgcttcccagcattgcttccccgctggtggactctgaatctagaactagctccaggcgcctctccaaattcagacgggagctggggcactattataatgcaaatctaggcaaagccctcccaataccaggatccagaatggggtggggccctttgccctgaaaagctgtttagtttgaaaatacaaacaggagacagaaaagtttggctaaattaatggataaagttttaacgatggtaaccatagtagggttcatcgacagccagcgatggttctgaacacttgacatgtattaactcacctaatccccacattttacagacaatgcaaaggaggctctgggaggttgagtgacttgccccaaagtcgcacagctcctaagtgaaggattcggagtggactccaggcagcctggtctgactccctgcactgcgctgtgcttatctctggccccaatgccgccatgcagaagtgtctgggggcactttgtctctgtcagacagaattcggagatgtgtatgcttgccctggtatggcacttctctttttttgagacagaatctcactctgtcaccctggctggagtgcagtggcatgatctcagctcactgcaacctccgcctcccaggttcaagcaattcttgtgcctcagcctcccaagtagctgggattatagatgtgcaccatcgtgcctagctaaatttttgtacttttagtaaagatgttgttttgctgtgttggccaagctgatctcgaacttttggcctcaagtgatctgcctacctcagcctcccaaagtgctgggattacaggcatgagccaccatgcctggcagtgtggcacttcttacgtgtgttcagcggacactgtttatcttctgtccctccaagacggtgctgagctcaggtcgttcattactggcagacaactgctgatttccaacagaattgccatcctcttctcccctgcgactttcagagtgtgacctcagactcaaaaattagaagtgaaaacatcttaaaaactatcaccttttcttcctaatcctcctctcccctccctgtcttccttgttgtccccatctaatgaactatcatggcaaaaagagcccatttctggtcattttctgtggcctttcaaactcccacctaccccactgctcctgggtgcattacccgaaagctgagacttcagtgcagaaagtgccaggccctctgtccccccagatcgccttccttgtcttccctgtgcttgcctgtcacattgtgtgggttccagcgctggaaggaatgaggaacagattctctggttctccttttgaagtttaccttcgctccaccacttctgagaccttcccggaagttgccccttgtttctctcctctccagggctgccccagagctgcctctcacctcttcctgctgtcaccccaccaccatcagggcagaagttgggacaaagcctctcctactggctcctgcttttctcccttaggtccagcctcctcttctccatcttcaggagtctccttctccactcacacgtcatgacttcagcacctcgcatcagtccagaatatgactgcttgttcaagtgccacctttctcatgcatttttttctagtgacaatcacagccaccctgtggggcaggagtgtcatcatccccatgtttcaaatgaagaattgcagttcagagagggcaagtgactggcccagcctcaacagctagccagtggaccccaccagggcttctgactccagtccgggttccctttccacccaaatccatggagggagctgagccgagaacaggtgtccttcaggaagacgtgaagccaaagcctccacctccaaactcaggggcccagggagtccaggcacccatccactcacaaggctggatatggtgcattccaggagaggggttgggggcgagtggcctctctgtgtacccgtggggatagatgcgcaagtggcatcgccacatcgtgagtcctggcttcatgggtgagctccaggtccaacgagaagccaagcagggggcccttcaagctcagctttgggcccgggtcggggtacagggtagagcgggcctccccagcccctgccatgaggccaaggcagtgcatcgttcgcagcgtacattcagaaaccaaagcctaggagctggttatcattccggtttacagctgatggaagagcaggtgcttccgagaacccacagtgctctttggccagtgacccaagggtgcctctgagaggcctcgcagcacccggaggtgctgctgaggcaacgccctgactgtaagaaggaccattcatcctcagagagtggccgtgatgctgctgcgacagtcccaccatccctcccgactctcactcccaacagacttcccactgtaaagctgaactctccagcaaatcacctctcgccagactctctcctcactctctctgggtccactagaggttcctcagcctctctttgccttggttttcccagctgtaaaatggagcaaagagggcctatgtacccacaaaggtgtggttggagcgactcctcctacattagggcctcgagtggggcttcatgattggttggtggaggtctccaaacccacccagtgccaccgaaggctgagactgcagatgcaatgccacaggtgtccttcctcagcctgggcagctgaacatcatgtgtaaaacggggataataagataataacagccccttgcacctatgtggctgtgaggattaaacaagataaatgtgtaacagtgcctggctatagaaatatttactcttgttattaagggaagaatatgtgtggctaaaaagggatcgaagatgtaaaagccaatccctccccctctagcatatttaagggtaatgttgagttggtttgtggaccatttgctgcctgttagagctggaaggtagggaccccctctcaacagcgatgctacaaattatacccattggaggtcaaccaaaagacaaagcttattggctggacatggtggctcacacctgtaatcctagcactttgggaggccaaggcaggcggatcacttgagatcaggagttcgagaccagcctggccaacatggtgaaaccccatccctactaaaaatacaaaaattagctgggcgtggtggtgcacacctgtaatcccagctactcaggaggctgaggcaggagaatcactagaacccaggaggtgaaggttgcagtgagccgagatcgcaccactgtactcaaaccgaggcaacagagggagacgcaatctcaaaaaaaagaaaaaaagacaaagcttgttaataccagcatattgttaagggaataaagtaggctgcagaacaactggtgtaatatggtgccatgtagggaaaattacatgtgtgcataggagaggggtctgcaaggttgtgccctaagatgttagagtggttcctttgcttttctcttttataattttgtatttgacttttaaataaggaccataaatcacttttataaaatacattctctccagcccctactactcctttaaagaataagagtggtttgcccaagaaagacagttttttttgctctggttttcttgattctgacatcagaggaaactccttctcatccacttggggctctgggttcaggggattcatttcaggcagattaaagtggtgaccaggggcattcgtggacacagggagggacaggagcaccatcagtttgtctcacacaaccactgtcatcctcactgaaggctgttgcctgatcaaaaacagtattgggccaggcacggtggctcacacctgtaataccaccactttgggaggctgaggtgagtggatcacttgaggtcaggagttcgagatcaacctggccaacatggtgaaaccttgtctctactaaaagttcaaaaattagccaggcgtggtgggtgcctgtagtcccagctacttgggaggctgaggcaggagaattgcttgaacccgagaggtagaggttgcagtgagccgagatggcaccaccacactccagcctgggcgaccgagggggactctgtcttaaaaaaaaaaaaaaaaaaaaaaaatatatatatatatatatgtcaaaaatggggtagtttttagatctatagtagttctaaaaacaaaggccatccaagcatgacagatttacaagcactattggctattccagtagttacaatggaggagagaagcttttagttaaaacaaacaaacaacacaacaaacccagaaaccttaggtcaaaaccaaaattgtcctctcagacacaatctgggaattttctcatgacagtgggcattagccaactgacatcagcagcaaccatccgtgtgcacacagtggcaccacctcctcccaaaaagcagccttcatctatgccctcatacaatcgttgattattctctttggattgaggcccggaattatttaagtttcttcttgccagcatgagtctttcctttctgtatgctccttatcttctctctttaatttggcagttctgcttgaaatctgggtctttcattagtagtagttcaatttggttccagaacattctgtggtgtgatgcaatgtgaccagagctcacacttcagagctcttcaagggccagtcttactgagcacctcccagtggctgcctgtgtgctgggcgccacttgtggtgggcaggagagaggaggggacacaaaaggagacacagctccttcttagaagctcaaagttggggaccagctgccacagaagagtatgtttagcatctgagacaccaagatccagcgtcacaagggtgtttattaagcctcctcatctctttctttttctttttttttttttttttcctcaggcagtcttactctgtcacccaggctggagtgcagtggcatgatctcggctcactgcatgcaaccaccacctcccgggtttaagcaattctcctgcctcagcctccccagtagctgggattacaggtgcccaccaccacacccagctaatttttgtgtttttagtagagacagggtttcaccatgttggtcaggctggtctcgaactcctgacctcagatgattcacccacctcggcctcccagtgtgctgggattacaggtgtgagccaccgcgcctggccttgctgttgattcatctatagtatgtttgacttgatgacctccagttaccttagacagaggttctcatctaagctccaactttccatttcctttgtcctcgtctttccccttaacccctccacatttctctcaaaatcaccccacttctaaaaaatactgtttatttttcttttaaatttcaaattatctatactcattgaaataaatcaaaatagcatggaataagcgaaaaaaatggatcccacccttccccactcccattccctagggctaaccatagttaaccatttaatgactaggtttttttgttgttgttattttttatttatttattttgagacagagtcttactctgtcacccaggctggagtgcagtggtgtgatctcggctcactgcaacctctgcctcccaggttcaagcattctcctgcctctgcctcctgagtagctgggattacaggtgcctgccaccacacctggctaatttttgtacttttggtagagacagggtttctcaatgttagccaggctggtctcgaactcctggcctcaagtgatctgcccaccttggccttccaaaatactgggattaaggtatgagccaccgcacccagccctcctgggctcttttcctttagttgcactcgctccccgctcctggagtagagggatttccgagagactgtgggctccagccttcacctaggcccaggactaggatgcctgccctaacatttatctttataccttaaagcaaaacagctggaccataagcattcaagaacaaactgtgaataaggagaaagttctcccaggaaacaagagctttagttatgttgggccagcccttatattccttagctgttaccagtcactgcttgatttaatctcggctatcacttggcctgacaggtctgctgctggtgccaggatgtctgggttttgaagcctggctccattacatacttcctgtgtgaccttgggcaacttactcaacctgtctgttcctcagtttccccagctgtattatgtcagcataatagtttgttgtgtgaattaaatgaggtaataactggaaatgcttcaaacatggttcctatcatgagaaatcctgctttccgcctaaatgtgctggaaaattcctggtggtgcagaacaggagaccagagcaaaggaaagacagggtgcagaagccaaaaattaccttggagaacaaagcgcatgttaaggttatttttggattctaggtttatctctgcttggtcttcagttacctacaagagatccatttaggggatttttgtttgtttttaacgatagctttattgagatataattcatatgccataaaagtcactcttttaaaatgtttccggtatattcacaaggctgtgcagccttccctgtccttgattccagtctgagtttttaactgaagggataaggaggaccacgctttccccagaccagaaccgcgggccagggggcgattccgctgagtcaccgcgggcgcctggtgcgcggcggcggagcccgggaccttccttggctgccccctagcgagggccgcagcgcagcctgagacacccgccggggccgctccacggccgtcggatttagactggaagctcggtccaggtccccagcttgatgcgcccgcggtgtaggagaccagcccgactcgagcttcccctgagcccctggactcttgactccagcagggcctgggtaatgaacgtcagctcccctttcccaaaggggttgctctgttgggaaggcacccgtttgatacagtagcatagagatgggttttagcatcaaaatatcagaattcaagccttgctctctgcttactagctgtgtgaccctaaaaaggtttctgaacgtctctgagcttcagtttcctcatcattccttctcacggggtggttgtgagcattacagagatcctctctgtgaagcccctgtgagtggctcatcctgagggctgaaataaacatgttattaataatccaaaactggcaagggatgttgactggtccccctcccttgcccaaggagctttctagaacctgagttatcattaccaaactgtactgccttgagtaagaaagttagaaggaatgggaaggatggtggcaggtggaggaaggcggattggtcatcacctccttgcagcaagaaacagccccagatcgtgggaaacctacagacctgctagacagactaggagcaaaagctggggctttaagaatccccagggaggttctcctgagagagtagccagttggattttgtaagcagagatttgtttggggaggaggtgacaacgtagggagcagaggggcaaagctgtcgggaatcctgccttgagggcagggatgtgtgttggggggagttgggtcactggggctcggtggccttgggcaagtttctacctctcaggtcctttacccacctagggtcgccatcctgcccacctcacaggttacagtgagcctggatgcactgtcatgggcaggtgcccaggaaaatggcagacatgttccaaacagcacgcagcattccccagtgatgcccagggtcaccttggaggtgggcgagatgcctggggtttctcgtccaccccacaacacctcaggggacagccaaagctgtcccttcaggtaagctgcacagaagatgtgaactctgctgcaaagactctattctttgggagcaaaagggacccagggtctcacctgcacatccctgtccctgagggcctaggggttcttggaggccccagccttggcaaaatgaggaagaaggtgaaggttgtctgggcccctgccaggctccttcctcggccacgcactccccttcctgcacacacacccttctccctccaccccatctccattgttgtcagaaaagtcacaataaaaaggtccatattgtctagttcccatacttttaatttttaaaattttatttatttatttatttatgtattttttgagacagagtcttaacccaggctggagttcagtggcatgatctaggctcactgcaacctctccctcctgggttcaagtgattctcatgcctcagcctcccgagtagctgagattacagatatgtgccactatgcccagctaatttttgtatttttagtagagacggggtttcaccatgttggccaggctggtctcgaactcctggcctcaagtgatctgcctgcctgagcctccggaagtgctgggatttcaggtgtgagccaccgcactcggctccacacttttcacttattaaaagactgtggtgtccatcaatggatgaatgaataaaccaatgtggactatccctcccattacccaaggaatgaagcacggagccgtgccaagatctggattcacagtgaaagaagccagtcaccaaaagccacgtgctgtgtgacttcccttatacgaaatatccagaagagatacatccatggtgacagaaagtagatgagcagctggggactggcgaaggggagaagggggagcagctgtctatgaggtccagcctttcttctgggtttggtgagaatgttttggaactagatagaggtgatagttgtacaacattgtgaatgtactaaatgccactgaatcattcattttaaatcgttctttacgttgcatgaattttaagtcaatcaaaaacagttgtttgaaaagagaaaagcctatgggtagcggcagcagtgattggatttatgattcgattccatggctcatccctcccctgcctcaccccctcgccctccgacgtcttcttcttttactctgaactgttatctttgttctcatctctctctctctctctcaaccctgcagacacttttccctttctttgtctgcccccaccctccagatttccgtgtctccagtgtctccctacgaggcatgaattgagactgggagggtgtgattctgaagaaggcaccaacagtgactcagctagccccttcccccaccccgccccccgggcctcaatttagctaaaaaaccacagggacggactcaggaggcaatacctttccaagggtccctaaaaaatgtcccattttagtgtccaggtttcactcaactttagtgcctcccctaaaatgtgttccttacctcccaccccactgcatctaagtcactgcctgagaaaacaggattgaggaaaggagaaaggaagagagagagagaggaggagagagagagagagggaggaaggctgatggatttagaaaagaagaaaacaagtggtctgaggaaaacagccttggtgtgtttattttcctgtctgtgtatcgcttctcggccttttggctaagatcaagtgtattttcctgtctgtgtgtctcgcttagattacagggatctgtgggtgatgacacgtctggtccaggctgcgtagtcacctcaagggcatgcttattgatgtgtttttcaattcactatctttgcatgggagtcccaggccaagaggcacagctgcgccatttgtctgttggtttagatatcctttatccagttcttccagagaaatcatcctgcccttctggaggaggtgggcagcaggggtcagagatgggagggaaaggaaggagccaggtccttggctaggatgccagggtcccctgcctctcacctggcctgggctggaggcctcctgctgtcctgtcactgatcactaccccgccccagcctcctgagttagaagacacaggctaaagtagagtatttcttcattgaaaaacccatacaaaataaaggttcataaaaaataaaaatttagactgggtgctgtggctcacacctgtgatcccagcactttgggaggccaaggcaggtggatcgcttgagccctggggttcatgaccagcctgggcaacatagtgaaaccccatctctacaaaaaatacaaaaaattagccaggcatggtggtgcatacctgtggtcccagcttctcagcctatggacccacatagaatacaatgtcagcataagaagggagccctggggtcaccaaatggtttgggcggcaaagaacctgaaggttgagagaagtggcttggttacccagctgttggatgtgagacctggccactgcttcttccataccctagacctgcaccctgacatctcaagtaaaaagttgggggatgttttatggtccaggatgaaggaagggcagtgaggggcagcggagcatcactttgcatttctgtctgcctcttactggctgtgtgacctggggcaggtaacttcccagactcctgggaatcataacacctatgatgatgatgatgatgatgatgatgatgatgatgacacctacctcaaggattgccctgaagggtcacagagatgcctgcaaggcacctgcatggagcaagcgccccttctctggcaggtgctgggtgagcactacctgctgccaggccctggggctatggcactgcgtgaccctgcaagtcctacctggcgaagctgtcgttcttgtgctcagtcagtgttggttgtaagactgagaagagtcacttcattttgctctccagggacatctttctgggtcctattttctgcctatgtcaagtagcgcctcaaggatgctcctgaaaatgggcttgtctttcttaacatggcaggtaggtcccaaagcattagcatggggcagctgacctagcccagccaatgcagtgcagtgactcttgcaaccgagtctaatcagaaggtccatgaacctacgagcatttcctgtcccaggatcagggtggaggctgagcctccctgcttagagattcttcccatgcattccacttttttccccaaaagaaaatattgacccttgagaggcacacagtttatttattttgcatagtaaatagtagcctgtattttaaggatgagttgatttctgcatcagcccctgtaggtcatcagccttctattggtgcatctgactctctctagccctgcagggatggtggagggggaggggaaggagggatctttattggaaaccaggacagtgagactcattgccctgtcatctgctctgtggtgctgaatgaggcagcccaacagagaaataccctgagcgagcatccccagcctccaaaacagtggcgcattgccctgagtcctgggaatgacctttgattctcctgctcctgacttggaacccatggaaacctctagaagcagctgaggaaaacccaacatgaaaagcagaactccacactgagaatataggaggtgatcggaacatacaatgattcttgctaagaccgattcacagtttttcttttttttcgatcgaagaaatactggagaagcctaaagaaggagtctaaaaactctggcacgtgggccaaaactgtccttgagctaagaatgattttcacatttttaagtggttgaaaaatgaaataaaataagatgatgttttgtgacacatgaaagctatgggaaattcaaattctaatatctataaatagtgttttatcagaacacagtcatgctcatttatttatgctcgatggctgctttcccgctacaattacgttgagcagttacaacagagaccacgtggcccacaaagccttacaatatttactatctggccctttccagaaaaaaatgtgccgactcttgaccttaacctcagcaatttgggaggccgaggcaggcggatcgcttgagctctggagttcatgaccagcctgggcaacatagtaagactccatctctacaaaaaatacaaaacattagccaggcatggtggtgcacacctgtggtcctagccactcgggagactgaggtgggaggatcgcctgagcccaggaagtcgaggctgcagtgagctgtgatggcaccactgcacctcagcctgggcgacagagcaagaccttgtctccaaataaataaataatgcaaagtaaaataaataaaaccatataaaaaggaatcaatttaaaattataatgaaagctggccgggcatggtggctcacgcctgtaatcccagcactttgggaggctgaggtgggtggatcacgaggccaggagatcgagaccatcttggctaacacggtgaaaccccgtctctactaaaaatacaaaaaaaaaattagccgggcacagtggcgggcgcctgtagtcccagctactcgggaggctgaggcaggagaatgtcttgaacccgggaggtggagcttgcagtgagccgagatcgtgccacttgcagtccagcctgggcgaaagagcgagactccgtctcaaaaacaaaaacaaaaacaaaaacaaaaaaaaattataatgaaagccaaggggcatagtagaacaaattttctagagctcattaagtcaaatgagtcaccagttagtaaaacgcagtcacggggaagagagggcaggattctttgaagcagcggctctcctaaaaacaacccacccttgtccagctgccttccctcctgagggtgttccctttgactgtgtgacccccatcccctatttcccaaccgtccaagcccacctctagcataatacgagcttttaatccctctccctgaccccaacccgattttgaagcccagtctagtattttctcaaatacacttcttggctccattccttcctttccatcacctctgccttttcactgcatgcttggaccactgcagtcagctccctatgaacagttgctctctacccatccaatcggccccgcctgctgctgccaaattcaccgagggcacctctgtggtgctgcctgtggacaaagtccaagccagccacctcacccacctacaggtgagtggggagcagccagcgtgtccagtggtttaccccatcgccacagacttggtgatgtgtcgatgtgcagagaaggggtgttggcagccacaacacaagcaaccccgccccatgtgagatctaagatgggcgtgctgggagccacctctgagaatccaacagaaggcagaggggagaacggctcacacggcacaaacactccttccttttttttttttctttttcctttttgaaaggagtctcactctattgcccaggcaggagtgcagtggtgcaatctcagctcactgcaacctccgcctcctaggttcaagcgattctccagcctcagcttcccaagtagctgggattacaggtacactccaccatgcccggctaatttttgtgtttttagtagagacggggtttccctatgttggccaggctggtcttgagctcctgacctcaggtgatctgcctgccttggcctcccaaagtgctgggattacaggtgtgagccatggggcctagcctccttccatttaaatgtatgcctaatttgcccattgagaacggctgagacgcattttaagtggccagggtctacttagagttagtgctcatgaccaggcccaggtcaagcctggctggccagatggtgcctttgacctgctctgtctctgtgcaaaggaatgagctgaaggatgggggtgcagtgtgtgggcagtgggctggggctggcaggactcagtgactaagggaagagaactttcctcactaccagcctgtcttttcagggcaccgcggggggctttgggacttggtgatgaacacagcacagagagctgtccagcatgcgggtccctggcttctcacacttcccaggctccttcagaggctctctccaaagggagctgctctctctagaacccatgaatttggaatataggcaaccactgcattggggaccactgacctcaaacatagagaccagagcaaatggggctcatcacgtgaaactcatctggaactctagcaggttcttttatatatatatatatatatatatattttttattattatactttaagttctagggtacatgtgcacaacatgcaggtttgttacatatgtatacatgtgccatgttggtgtgctgcacccattaattcatcatttacattaggtatatctcctaatgctatccctccccactccccccaccccacaacaggccccagtgtgtgatgttccccttcctgtgtccaagtgttctcattgttcaattcccacctacgagtgagaacatgctgtgtttggtttttttgtccttgcgatagtttgctgagaatgatggtttccagcttcatccatgtccctacaaaggacatgaactcatcattttttatggctgcatagtattccatggtgtatatgtgccacattttcttaatccagtctatcattgttggacatttgggttggttccaagtctttgctattgtgaatagtgccgcaataaacatacgtgtgcatgtgtctttataacagcatgatttatattcctttggttatatacccagtaatgagatggctgggtcaaatggtatttctagttctagatccctgaggaatcgccacactgtcttccacaatggttgaactagtttacagtcctaccaacagtgtaaaagtgttcctatttctccacatcctctccagcagctgttgtttcctgactttttaatgatcgccattctaactggtgtgagatgttatctcatggtggttttgatttgcatttctctgatggccagtgatgatgagcattttttcacatgtctgttggcgaactctagcagcttcttttcacaagttcatggagagaggtttcccactgagggaatcacatctgtctgatcaaaagaggcttgggaaatggctctcctgttcattccctgaaaacctctgatggaaccactgccactgtggcagccccagcactggcaccccagccatgattggtgccccagccacatctctgctgtgagccccagagccctggttaattaatcatccacgtgttgatggggagaggcccattcacaaaagcgacataaagcccagggagacgtggccgtggcaagaagggtgtgggactacattccgcccccaactgagagattcagaaaccagaaaaaaatggaaaaacatactgtgctcttgggtgggaaaactaaatatcatgaagggagcaatttttatagttttggcctataatacaattccagccgaaatcccagtggaactttgagaatttgcaggaaaaaaaaaaatgtctaaagtacatctggaagacaaacttacaagaaggtcaaataattttgaaaaagaaaatgatatctaagcccacctagagaataagacttgagatccaaagctaaatcaggaggctctagcaaaattgacagataagcaggacagagtgcatggtgcattcacctggggaagagggcagattggtctacaaataggcctgggtccactgactttagctgttatatttggggagaaacttttcaacctcactccatcttaaacctaaaaatattccagatgaattaataaatataaaaaattagaccactaaaaatgtagaagaaaatggatgatctttctataccatagagcaatggaataaatcacaaaggaaaacagatttgactatataaaacttaaaccctgcccatcaaaaaccatcagaaaccaaaataaaaggcaaccaactggagaagatagttgccacaaatatgatcaagggttaatgttattcataaattaagagcccacacaagtcattagaataagcactgagacctgaacagacaagcaaaaagaatgagagtgggtcggcgcggcggctcatgcctgtaatcccagcactttggaaggctgaagcaggcggatcacttgatcccaggagttccaacaccagcctgagcaacatggtgaaaccctgcctctacaaaagtcataaatattagccgggtgtgatggcacacgcctgtagtcccagctactcaggaggctgaggtgggtggatcacttgagcccgggaggtagagtctgcagtgagccaagatcacaccgctgcactccagctggagcaacagagtgagaccctgacttaaaagaaaaaaaaaaaaaaagaggagaaaaatgctgatctcactagtaattaaaacatcaggccaggcgcagtggctcacacctttaatcccagcactctgggaggctgaggcaggcagatcacttgagatcaggagttctagaccagcttggccaacatggtgaaatcccgtctctacaaaaaatacaaaaattcgccaagcgtggtggcacatgcctgtgatcccagctactcgggaggctgagacaggagaattgcttgaacacgggaggcagaggttgcagtaagctgagatcgtaccattccagtccagcctgggctacagagcgagactctgtcccagaaaaaattaaaacatcacatatttaaacaactctaggatatcatttaaaaaaacattaatagactgttttttagagcacttttaggttcacagtgaaactgagtggaaggtacagagacttcccgtatgttccctgccctccacgtacagcctcccccactgccaacgtcctgcaccagagtggtacacttgttacaaccaatgaatcctcattaacatatcattatcacccaagttcatagtttacattagtaaaacatcatctttcatctataagcacaaaaattttttggcatttatttaggtgtatgattaactcagtgttgacaagactcacacttcatacccacttgcactgcatctgagaagcaattggtgtctacagccgctacaccctcaacaagcccgatcttgtttgaaaagcaattggtgatgcttctcaaaattctatggacaaagtcagccgggcatggtggctcatgcctgtaatccctaaactttgggaggccgaggcaggcagatcacctgaggtctggtgaaaccctgtctctactaaaaatgcaaaaattacccaggcatggtggctggggcctgtaatcccagctactcgggaggctgaggcaggagaatcgcttgaagcaaggaggcggaggtttcagtgagccaagattgcaccactgcactccagcctgggtgacaagagtgaaactccatctaaaaaaaaaaaattatggacaaagtttttcaaaaagatatttaatgcaactttatttgtaatattggaacatctgaggccatttcagtgctaactattaggggatggttaggaaaatatggtacatatgtggaaaggaacatttggtagttagtgcccctgatgtttacaaaggcttttagtgaccaacaaatgctcatgctataatcttatgtgaaaaaagcaagtagcataattgcaactatatttttaatgcatagaataaaaggctagaaggaaatatcacagatccttgacatacattcccaaacctttgtaaatccgcggattcatgaaaacagacacatttgcacaagtgcctgatcttttctgttatacattcattagaagtcaagccctggtgccacaaagtatctgccttttcaaatgtgatcagaatgttctcttttgcttcaaggccatttttcacgaagcagtggcatttttgcctcttcatcagagtcaccgtgtgccctggaggactgagaacagcagagccgttttaggatgggacagggcagccaggaggattgggctcactccctactgagtgcctcactcccgtacagcccccatagaggaagaggggttcaaatttattcctcagccagatggcatgtgccgcctgtcctggaatttcacatcacttatgatggaccaaaattccaaaagctgaatccatgattgtcaaagtctggtatggcaggatgtcaacagtaatcgtttctgggcagagggatgattttctcttcccatcttgctttgtataaatacattttctataataaggttgtattacttttctcatcaagaaatagcaaagtactgttttactcaaaatatgaatagagccaggcatggtggcagcttatgcctgtaatcccaacactttgagaggcggatatgggaggatcactttagcccaggagtttgagaccagcctgggcaacatagtgagacccccgtccccactcccccaaagaaaacccacaaagcatttatcctggattattcacaggggccaaaaaaaaaaaaaaattcaggcctcctatagccatgagctacgaatatgaaaatatgcaaatgtgtaagaaaagccagcacatccgatttttacttttactttcacacctctgtccaccatgttccaagagaagaaacttggtcattgaaaggaatagatcaaatccaaagaacaaaaccactgtgctcattaaacttcttagtgttcacaaagctttagctgcaggttgaatggggcaacccgaattggctggctcacctgggctgcagggagcagagatcgcgacactgcactccagcctgggcaacaaagcgagactctatctcaaaaaaaaaaaagttcataaattcaaagttatgaattatttttaaaataataataatttacaataaagatgaggacaaagtgtgagtaaatggtggtttctatccagctctgttgagctgaagtggcatctccctgctggggcttttggggaagaagggtgtgtgttgctcttcagatcccaagcctcatgcccctactgggccctgtggggtgcttctcagcccaccaggagagccaccgttggaacacacacgtgggggacctggtgggtgccggtgtggtgaatgggggccacagcctgactccaggaagccagcaaactcggagctggaggagtcaggacacccccgatgagtcaagagttggttttgctgccagttgacatctgattgaaccatctcttcacttctccgtgcctcactttccttaccagacaggctctgctgatgctgtccctctcctgttcagtcgtgccctcaccgttaaagagaaagagcaaactgctgggcagcagcattgatttttttaatgaagtggaaagagagctgggaataacaagtcgggcccacctcacctgcctcacctggtgggtttatttgttttgtttttttttttttgttttgagacagagtttcaccctgtcacccaggctggagtgcagtggtgtaatctcagctcactgcaacctccacctgccaggttcaattgattctcctgcctcagcctccccagtagctgggattacaggcacctgccacatgcctggctaattattgtatttttagtagagatggggttttaccatgttggccaggctggtctcgatctcctgacctcaggtgatccacccacctcggcctcccaaagtgctgagatcacaggcgtgagccaccatgcctggccgtcacctggtggtgttgaatatgaactgctgcggtgttggtaaattaagcaagcagatagatgtaaataacgcttgggcaggaatatggagcacgggatgaggatgggcggccaactgttagagagggtagcagggaggctgagatctgcctgccatgaactgggaggagaggctcctctctctcttcacccccactctgccccccaacactcctcagaacttatcctctcctcttctttccccaggtgaactttgaaccaggatggctgagccccgccaggagttcgaagtgatggaagatcacgctgggacgtacgggttgggggacaggaaagatcaggggggctacaccatgcaccaagaccaagagggtgacacggacgctggcctgaaaggttagtggacagccatgcacagcaggcccagatcactgcaagccaaggggtggcgggaacagtttgcatccagaattgcaaagaaattttaaatacattattgtcttagactgtcagtaaagtaaagcctcattaatttgagtgggccaagataactcaagcagtgagataatggccagacacggtggctcacgcctgtaatcccagcactttggaaggcccaggcaggaggatcccttgaggccaggaatttgagaccggcctgggcaacatagcaagaccccgtctctaaaataatttaaaaattagccaggtgttgtggtgcatgtctatagtcctagctactcaggatgctgaggcagaaggatcacttgagcccaggagttcaaggttgcagtaagctgtgattataaaactgcactccagcctgagcaacagagcaagaccctgtcaaaaaaaaaagaaaagaaaaaagaaagaaagaaatttaccttgagttacccacatgagtgaatgtagggacagagattttagggccttaacaatctctcaaatacagggtactttttgaggcattagccacacctgttagcttataaatcagtggtattgattagcatgtaaaatatgtgactttaaacattgctttttatctcttacttagatcaggcctgagtggcctctctttagcaagagttggttagccctgggattcttactgtagccacattaataaacaacatcgacttctaaacattctataataccatcttttggccaaattgacttcgcctcttcctctctctttccaaatgaaatgtgtttcatttcactgtcagaccacatggttggggaccccacagagcacacagccctccctctgccttcccatgctggcccttcacccactgctggagtgccaggttggtccaagggttggaccaagttgtctgaggttgtctcaaggttggtcgaggctgtctccgcgctgggttgtgctacaaggagcccttctttccatgggtgtggctggcagtgagtgctcacagcaacagcccacagtgcagcccgagggcaggatggactcagtccctgcctccatacccatttctaaggaggcaaaatggcaaacactctacttttctcttttaatgctaaaaataagaaaacaccttgcagcccagggtatgggtagtgcatggaagccgtggagttgtgaggtgggaagtgacctctgctggatatgtctattcaggaagattgctggagtgggtggggtctctgggaggtcccctgagtgtgggaagctgggaccaccagctttctcgcacagggagtggccatcccagcttggagaggttccaggactggttgggaggcacgtttcagatttctatctgttgaatcagcgaagatattggattatgaggaatttgggaattaggaaagtgggtgcaggtgggttgggggtaggtgaaggaagacatgggcgtattgggggagcaggggctgctcagaggtgttccagaagctctgggtgaggaggtgagagggaccggggaatgcagctcggcccagcctccctgcctgaggtcagccatcacgtggtgatggcaagatggaaatgtgctttctgactgctccagccagtgctgccagattcagctccccagggagggcacctgagaggctccaagccaggagatctgttttctcctttgttttgtttttttttgttttgttttgttttattatactttaagttctagggtacatgtgcacaacgtgcaggtttgttacatatgtatacatgtgccatgttggtgtgctgcacccatcaacttgtcatttacattaggtatatctcctaatgctatccctcccccctccccccaccccctgttttctcctttgaatccttcttagaggccgggtgcggtggctcacgcctgtaatcccagcactttgggaggctgcggcaggaggattgcttgagcccaggagttccagaccagcctgggcaacatagtgagacctcgtctctacagataataattttaaaaattatccgggcatagtggcatgcacctatagtcccagctactcaagaggcagaggcaggaggatcacttgagcccaggaggcggaggttgccgtgagccaagatcccaccactgcactccagcctgggcgacagagacccccatgtcaaataataataataataaataaatccttctcagtcccttcctcactgtgtccccctccactgaatttttccacctcctctcccacttcccccactcccgctttccctctccttctctccccactccatctttttctttctctgctgtttctcgtccctccctcctctccatcccacaacactgcctaccctgtccctgccccaccctggtgctcaggatgtgtgaagtgaggggtggtagcccccaagacctcaaccccgaaggttagcctgttgaaaccactttctcccagctgcccccctggcagttggtgctgctgggggaaactgggattgggggccagattttgcctcttttcctgacaaagagagatgaagagttctctcaccaggtgcctgggactggggtgtgggtgtcccagcctatcccagcgcatctgttctgcatcatgattaatagtgctgctttcagccgggcgcggtggctcacacctgtaatcccagcactttgggaggctaaggtgggcagatcacaaggtcaggagttcgagaccagcctggccaacatggtgaaacctcgtctctactaaaaatacaaaaattaaccaggtgtggtggtgggtgcctgtagtcccagctacttgggaggctgaggcaggagaatcacttgaatctgggaagcagaggttgcagtgagccaagatcgtgccactgcactccagcctgggtgacagagcgagactccgtcctaaaaaaaaaggagttttgctctgtcgcccaggctggagtgtagtggcgccatctcggctcaccgcaacctgcgcctcccgggtgcaagcgattctcctgcctcagcctcccaagtagctaggattacaggcgcctaccaccacgcccggccagttcttgtatttttagaagagacggggtttcaccctgttggccaggctcgtctgggactcctgacctcaggtaatccgcccacctcagcctcccaaagtgctgggattgcaggcatgagccaccgtgcccagtcaactccttctcaaaaaaaaaaaaatagtgctgctttctctttcaagtgtcctgatttgggtgatagtaaatgccactctacttataagggatctacctcagaatgctaattgggacatttttgtagcactctactgttggcagcaggtgatgctcacaacagcccgtgagggtggatgacgtccgcttcacagatgacaaaggagcctcatgctcagaccgtgggctgccagagcaggtccatggctgcagccccacatggaccatatttcccccttgtcactctttccaccaagctcccttggaacttcagttattaagctctcttgggtggaatccaagttagaatcacaacatgtgcctcatatggattgtgccagtgaaaaatgacattctatttagaggcagggcagcctggcttagagtcagtttaaaatatgtattatgctgcaacaaatgtaccatgatcctgtaagatgttcacaacaagggaactggatgtggggtatactgtctgtactaacttcacaagttttctgtaaatctaaaactgttccaaaataacaagttcgtttaaaattaactccaggagaccaggtacggtagctaatgcctataatcccagcacttcggaaggctgaggcaggtggattgcttgagcccaggagtttgagacaagcctgggcaacatggtgaaatcctgtctctaaaaaaaatcacaaaaattagccaggtgtggtggcgcattcctgtagtcccagctacttgcggggctgaggtgggagaatcatctgagcccaggagtttgaggctgcagtgagctgtgattgtaccactgcactccaacctgggcaacagagcaagaccctgtctcaaaaaacaaaaatgaaataaagtccaggaaagaagtaggttttaccactcttattttctgaagagaaaactaaatttaatgtgtaaagtgaggacaagttcaccaagttagtgtttgagttgcctaaaatatgtttgctaaaactattcaaagctttcacataaaacatgatcagaagttctatgccaaaacatatgtgtgtgtatatatatatgcactatatatactgtatataaaaatgcaaaatctaaattgccaaccttttagaaattgctctgaaaggaaagcatttcaagataatttgcttacccaaagaatatactttccaagaaagcaagtaatacttaaggtgttcataatcctcatcaaattaattcttgctactgaaagcttacaaggagctgttttgatgtcgggtgtgacaggtttgacttggcagaaggtgtcactttactaacaacattttaaataagtgacagaagacaagaaactacacgttaaatgccagaacaaagagtgtctaagtggatgctaagagttgaaatatggctggatacctgcccaagagagctgaaaagtagatgaaagttggttacctataaactagtgcaccctaatgaattaaaaggtgttgatgagttaacttgttatgccttccagataagacatgcaaatggggcttcttcctccttcactacttccaagggatttaacaaggagaccaatgcaaatgataaggactgtagggctcaagctggggacagattggggaaagggggaccatcatgcccatatagatgtccctgtgccctggcagtcaaggctgctgaaaaataacaaaacccagaagtctgcgtgatgctgcctctccatttgtccaaagccttcttgcggcagtttgcaggcttttgcaaaagctccaggaccaaggagctatgttcatgctggaagcttgttcaggattagctgttctttgtgggatgggtgcagccagggccaggtgtccagggacagtgttttaacaaagggcatgaggtgtctgatctcacagtggaactccacttgcctttttttcatcttctcattctgcttcatgcacagaaccagccccatcctgaaactgactctaaattactcccgccccaggtggagtgcctttctcggagttcaacagagccttcctgtcgcccaagggacaactccactgaatgcccaagccacacccaaaacctaacaagtaaaaaccaaattctgtgctcccccatcctgggccattcctggtttctctactgctgttggtgataccaccatcagcttgtccatcatgaccctggccagttcctcccacaaccctccacagcacccagggacctcacctccattccatccgacacagatctcctcaccacaaaccttggttttgcaacagcagccatgagacctttacaccctccgcccttcatcctgtcccccactgaggccccagagccattccttaaagcagcgcgccacaaactataacccacaagccaattctggtacccagcctgttttgcacagccagtgaactgacaatgatcttttcatacagccagaaaaacaaaacaaaacaaaaaacaacaaaaaaaaaccccaccattctgagcatgtgacttccatgttcaagatgtctcatgttcagaaaggcccctggaaaaggaggaaggggagctgggcacaaagggagaccctctcagctgagctcctcccatccagacattttcctggacttcctatccaatgacttcccttagcttcttatcagccacccctgtctgcccaggaggctggaagatgtggccttttaactgggcacagctctgtcctctatcatatcagggctctgttcccaaggagggtagagagaatggacaccaggtggaccctcagcagtctgtgccacagagggagtgtttgcaatttccagactaaaagtccccatgtgcttgacggggtatgtgactacaacgtgatgcttgacttttcctcatatgaccagagccactttgtccatctggtacaatgtcagctatctgctaggggccctccaggattcccagtcaattccatatctgcatcaccaccattggcactaaataaaataaaatactcaagttcctgctggtgagcatgagcagtgctacactgggcccttcaaccaaggtgacatgataatgactgaaaataatcactgccacttattggggacgtctcatctgccaggcatggtacaaagtgctttaaataagcattcaacaatttcatgctgacagaagccctgtgagccagtggagctactactatgcccattatacaggggagaaaactgaggcagagagaggttaggtaattcgctcagcctcacacaaccaataggtggtggagccaggatttgggccccatctgcctgactctctagaggctctatcttccagtcttccagagttgagtctaagccatgaataggacaattagacagcagaggaaacccattcagccaccatgtgcatgaagagtaaggaatttctgtcatacagaggggagtgaattcactgagctgagagctgaggaaccattgatctgatggctgagacaccactgggaagactggagaggcttttctgggcatgcagtgccaggcacaggaggagctgagggaagatgactaagaggtactggcaaagaattcagaaattctgatggaagctttacatgttaccatcacatccatccatctatccacccatccatccacccatatcttcctccctccacccaatcatgcatacatccagtcatctatacaccacccacccacccatccatccatccatccatcccttcatccatcccatcatccatccaattatacatacatccaatcatatatctgtacataatccattcttccctcggttcatccatccatccattcatccatccatccacccatcccttccttcatccttcctatcatccatccaatcatatatctgtacataatccattcttccctcggttcatccatccatccattcatccatccatccacccatcccttccttcatccttcctatcatccatccaatcatacatatatccaatcatacatctgcacatcaccagctcatccatctatccatttatccatccatccttccttccatccatcattcatccatcatacatacatctaaccatacatctctacatcattcattcttccatcgattcatccaattatccatcattccttcctccatccatcccattatccatttgatcatacatatatcatctatacatcatccattcatccatccatccatccatccacccatatcttcatccaatcaatcatacatacatcgaatcatctacacatcacccatccatccatccatccattcatctatccacccatccatccatccatccatccattcatctatccacccatccatccatccatccatccatccatccatgtaaccatccagtcatatatccaattacacatccatccagttatacattcatacatgcatctaatcattcaattatacatacacacatccatataattctacatccaattatacctccatccaattacacattcatacacccacctaataaattattaattcatatatccatccatataattatacatcaattatacatccatctaatcattcagtaattcacccaccatccagtcatctatccaataatacattcatccaatcatccatccatccatccacccattcatccatccatccgtccgtccacccatcatggtatgagccatgatttaccacgatggtcccctgtggacagcccaggtggggcagaactgaagggaagcccagggctgcccccataaacatttgcctcctttacatggatgagaactagatccacatgtataaatcctcatgatttgaaggtgcttttaccaacattcactcatgggattctcccaggagctctaggaggaggcaggtagagttgaggtcatctcacgcattttacagatgaggaaacggaggccctgagaggcaggtccaaggccacctgaccagaaagaagtggaactgggacttgaacccagccatcttgccccttggtcccatgctctctagcctgtaactcctgcttcctggtggggcatctccaggaggaccctatcggctggccatgggcctgccctggagtcttttgctctgtgtggccatccttcctccctcaggagagtgtgtgctcccagagcacaggctgtatcttctgagcattttgtcccttcccagtacctagcactcagctctgtatacattgggctctcaagaattctcaaccttccagagtgtaaggccttgacctgctcagccctggatactgcatgatgcattgataagcccataaaataaccagggcagattgactcccagtggccaaagtgccacagggaagggacaattcagcccttctaggaggaggaggaggtagttttctcatttctattaaggcaacaaaagctgccttactaaggacattcttggtggagggcgtgactgtcaaccactgtgatcatttgggcctctcttgcccaggcttcccattctgaaaggacagttttattgtaggtacacatggctgccatttcaaatgtaactcacagcttgtccatcagtccttggaggtctttctatgaaaggagcttggtggcgtccaaacaccacccaatgtccacttagaagtaagcaccgtgtctgccctgagctgactccttttccaaggaaggggttggatcgctgagtgtttttccaggtgtctacttgttgttaattaatagcaatgacaaagcagaaggttcatgcgtagctcggctttctggtatttgctgcccgttgaccaatggaagataaacctttgcctcaggtggcaccactagctggttaagaggcactttgtcctttcacccaggagcaaacgcacatcacctgtgtcctcatctgatggccctggtgtggggcacagtcgtgttggcagggagggaggtggggttggtcccctttgtgggtttgttgcgaggccgtgttccagctgtttccacagggagcgattttcagctccacaggacactgctccccagttcctcctgagaacaaaagggggcgctggggagaggccaccgttctgagggctcactgtatgtgttccagaatctcccctgcagacccccactgaggacggatctgaggaaccgggctctgaaacctctgatgctaagagcactccaacagcggaaggtgggccccccttcagacgccccctccatgcctccagcctgtgcttagccgtgctttgagcctccctcctggctgcatctgctgctccccctggctgagagatgtgctcactccttcggtgctttgcaggacagcgtggtgggagctgagccttgcgtcgatgccttgcttgctggtgctgagtgtgggcaccttcatcccgtgtgtgctctggaggcagccacccttggacagtcccgcgcacagctccacaaagccccgctccatacgattgtcctcccacacccccttcaaaagccccctcctctctctttcttcaggggccagtaggtcccagagcagccatttggctgagggaaggggcaggtcagtggacatctgatcttggtttagtatccttcattttgggggctctgggtgtggcctgggcctctggactttggccacggtgtttgttccagcccttctcctaacctgtcctttccagacactcggcatctaggttattagcacctcgcatactttctgacatgctcctcagtcctgattttgaccatcttctcttgcttcccatctgtgtcagtcaagactgcatttggctgtaagaaacagaaaccccaactaactgtggcatttacatgaagaggtttacttttctcacataatcagatgtctagacttggccagcacctcaagggtcattgatgctctcctgtctttattttctgtcatctttagtggttggattgttgcctcatggttacaaagtggctgctgcacttccaggcatcacatctgcctttgaagcaggaacaagttgcaaagtaaagtggccaaaagggccctgaaactaaatgtgtccccttaggaaagcaggagttttcttgcaagtggcaatcttctgcttatgtctcattggccagagctgggtcttacggccaccccttgctgcgagcaaggctgggacattgagcattttgccgtccaacctctttagcagaataaaccaagggggaagaacgttaatagtggcttttgagtcactagttggcagtatctgcccctctatctttccatcctccccatggagtttcaaggttcctttctcagtacttcttcaggctctgcacgttcatttggatcttgtgtcttggggtgaaaaactggcccaagtgtctccccaagcatccacctttggattaatttggaaaatggctgtcaagtgcccgcctcttgcttggtataatgctacagctttagaggacgcagcaggcatgggccttgccgctgaggttcttagcctcatgagaatatccagatcagattctcttggctccttcttagagccagtgatgcaagacacttcctgctcatcttgtcgggacggttttacaagttgcctgccatcctgagaaagtctacaaaacgatgccagacctcatgccagcttcccaagccttgactctcagtgctccctcaacaggattctggaagaatctcccaaacaagtcgcaatcccctctggaccctgtgcaggcatgagactcaagagcattggctcccacccctggtggagggaacactgctggggctgggatcttgcctggttgctccgcctgcacccaagacaaccataattaaaatgtccttcattgaacttggaaagccttcaaagctgacaactccttatgtgtacccggaaaggcctgggagtgtgccagggcattgctcgggagggacgctgatttggaagcatttacctgatgagagactgacagcagctcctggtagccgagctttccctcctgcctctgctgtgaaggtggacccatccaacagtcaaatgcctgactctggacaggagcggacctatttattgccatgcaagggactctgcacttttgaattgtgggtcatgggcttggatttaggggttagagctgggagaagtcttggaagtcacctagagatgacactgccattttgcagatgaggaaaccgtccaatcaaaatggaccaaggacttgcccaaagcctcacagcaaaaccataggcccccgcactaaccccagagtccctgtgctgtcttaagaatcaaatagttgtaagcaatcatctggttttcagtatttcttcttttaaaatgcctggggccatgcccagcagtctgtttcactgcagcgtttacacagggctgccgggctttcctggtggatgagctgggcggttcatgagccagaaccactcagcagcatgtcagtgtgcttcctggggagctggtagcaggggctccgggccctacttcagggctgctttctggcatatggctgatcccctcctcactcctcctccctgcattgctcctgcgcaagaagcaaaggtgaggggctgggtatggctcgtcctggcccctctaaggtggatctcggtggtttctagatgtgacagcacccttagtggatgagggagctcccggcaagcaggctgccgcgcagccccacacggagatcccagaaggaaccacaggtgagggtaagccccagagacccccaggcagtcaaggccctgctgggtgccccagctgacctgtgacagaagtgagggagctttgcgtgtttatcctcctgtggggcaggaacatgggtggattctggctcctgggaatcttgggttgtgagtagctcgatgccttggtgctcagttacctccctggctgcctgccagcctctcagagcatttagggccttctggacttctagatgctcctcatcttgcctcagtcagcgcgtcagttccagagacttctctgcagggttttctggggcaggtggtggcagacccgtgccttcttgacacctgaggtcagtccaccctcctgctcagactgcccagcacagggtcacctcccaaggggtggaccccaagatcacctgagcgcacagagggtgcagatgactggaccacaccttttggtgatcttaatgaggtggtcccagaggagctcagacatgcaatctagcatccagttctgggactctgtctccttttcaaacgtattcatgtagaacaggcatgacgagaatgccttgtcaacatgggtgatggggaatcaatcagacagggcgccgggctcaaggctgcagtcacccaagagtggctcagcccaccaggccctaggaaacgcctgcacagcctggagctcctggagtcatttccttcatgtcttcttcactgcacttacgtaaagatgccagccattggtttggtgatttggagggtgcccagttgcccaacaagaaatgcagaagaggcctagccaggatttcaccagcagtggagagtagagaagatgtggccagaaaagagtttcctttccctcctaaagatggtactccctgcagctactggggaagcctgcagcattctctagggctctgtgtgttgagagcagccccaccctggccccttctgagtgcatttctgctttgtgacttgatccgtgaagtcccctgagatgggcagaggggatgtcctcgaagctggggcagagcctcatccttgaacgtgaaggacgtttgaagactgtggcatgatcacaggatgagatcacagggaacttgagtttctctcctcctctcccttcacagttatttcactgagggaaatccctcccctgcccagaatgaaaactctagccaactcttgacttttccatcactccaaagtagttgaaagtacattagtctccacagtggcaaaacagtgtgcaaaagctaaataattagaacagccagtcccatgtgacagtcaaagcttctaactccattcaaagttgcagccattcccctcgagggctggcagggaggggaggggtaagagaaacaggaaggttcttactgagttggtcctggtgtgagctgcgtcacactccctgcagaggtttcaaggagactctctctctctctgtctccatggggaccttatttgaattcttctactcttaccccagcctgccatctccagctatcctcccctgaagagcccttctgctgcgctggattctggtggccatgtcatctcctcggccccgtgggagtctgaagatctggctgcagcctcacctctgaggtcctgctagttgccacctcttaaacatgatctgaggctcccatgcactctgacctgtgcccacatggggcccacgggaaacacgctggcaagcaaactgtgggtgtgcagacggttctcagggctgcagcacctgtcctttgctctgcccccaaagcaaggccagcccatcttccatcctctagtgttccttggtggggccctgaccacagtccaccaggtccctaaccagaggggacacacaccaggtgtcctcaatgtattgccttgaaacagttgtgctgggactgtgatggggggtggccatgtagccacccccaccacccccaagccactctctccaaggaaatcctcctaaagatccctttacatcctccatgtggtggggaggttctagagttgggtgcatgtgtcttcagctactgacaatgcagaccttagttggcacctcgctctggcctatcctgtttgctgttcttggcgctccagtgaaactccccatgggccatccagttggggtgcagtgtggccacccccttgcaggttcctgccttgctggagagcacagggccctcctggctcttgtaaaacactccccatggtacagagaggccagcagtgatgtgaggcccaacctccctccatggtgttcccaagcagctccctttctggggtcaaggggtggcaaagacagtgcagcgtccaatttctgactcaagccgggcctggctatcgcagctctgcactgtgtgtgacagcaaggcaactcacccagtgccgtggcagtgaccgtgtccgaggaagcctcctcacaccctctgtctcaaggactctggcatttagctggacttgctgtagctctgagcctttctgccattgccatcaccttgtcagaaactcaggccgaatctgcactcagagttgtgcccaggcagttgagccaacacttgctcagcgatattgtcacatgacaaggcactgtcaccactgggcgtcgtgggtagcgcagtgtcggctggatggacccggagggtgtctgtgtcatgctagtgctagtgatgggagccccgtgagcccattgcccgccctcccatgccctcagcagctgcctggggacagccaatggcctgggtgtttctgaggctaccacatggcttccaggaaactcgagaacctttctctcccttgcctacactcttcacacaggcctgtgctggccagcggtggggatccggcattcctatcttaggtgcagaaagtgactgactcattgcaggcctgggagataagactgatggcccagccagcaagatgtatggatttctcagaggcagtggcctctgtcattgtcctcaggaaatgctggtgattctggtggcctgaggtcaatgcatgtcaacgtggccaacttgccttataaactttttttctggacaattgcgtgcactgtcctgtaacagtgtcctgttgtttatgatgcagaaataggtgtttttaaagcctattgattttggtactattaatgtggtcaggaactttctcagtctttcttgtttggggtgagctgtggcttcctaaacaggaacccaagacacccccaaaagctgctcaccagcactgccagcctccctcttaccaagtagcacccgttcaggacattctgcgaaaggcatttgcccagaagttgggaggaaggaaatgtaacattttggggcacctaccatatgccaggcaccaggctaaacgtgttcacacaaattctcttactaaccctcaccatccttctacaagacaaactagtatcttcatcttggggttcaagatgaggaaatggaggctcagagaggttgaatgaatgccggtgcctggatatgaaccccatctgcctgactccgcaacccaggcaaagtctttccttgaacttcccagcagccactgcttagacacagcctccacaaccatggctcagcagcaaattgcttctctgacctcactcagcctgtgtgtccttgttgagtgaggcattcaggaccctggtcccaaagtggagaaagtctttcctactaggtcatagctacacctgcatgtgggtgctgtgccttttgtttagtgaacttttatcaccagcatcctcagcaatgacatttgcagagaagccagagctgaggcaccttggtattcttgggatgtgactttcctgaatgtttaagggaaaatgcccgaaggtacagagagcttggtttctagtaaacaataactgtcttgcttttaccccccttcatttgctgacacatacaccagctgaagaagcaggcattggagacacccccagcctggaagacgaagctgctggtcacgtgacccaaggtcagtgaactggaattgcctgccatgacttgggggttggggggagggacatggggtgggctctgccctgaaaagatcatttggacctgagctctaattcacaagtccaggagattttagggagttggttcttatcaaaggttggctactcagatatagaaagagccctagtggtttttttctaataccatttctgggtaattcctaaggcatttagtgttctgaaagatgctagccttgtccagcctgggagttgagaatgaatgtctaacagaaactctaggccgggcgtggtggctcacgcctctaatcccagcactatgggagacccaggtgggcagatcacctgaggtcaggagtttgagaccagcctggccaacatgtgaaatcctgtctcactacaaataaaaaaattagccgggtgtggtggtaggtgcctataatcccagctactcaggaggctgaggcaggacaatcgctcgaacccaggaggtggacgttgcagtgagccgagatcgcatcattgcactccagcctgggcaacaaaagcaaaactccgtctcaaaaaaaaaaaagaaactcaaatatgtgtgacaggcgattctcactgcaggctgccctgtggctgatccaggagcaaggccttaaccatgtcatccccaagcgattgcttgtaaactttcttctgtgcagccttcaacccttattatgattttcttctcaggaaccaaactgctgtattcaagaaaggcagctttgtgtaatcatttatcataaatatcttaagaaaaatcctagagattcctaattttaggaaatgggagacctatggtactgatataatgtgggctgggcttgttttctgtcatttgctagataaatgaacttgagagcctactgtaaaatgtggaagcttctagattgcagaagggctggaaagacactgttcttttctcccgagtgatgggatctgtccagtatttagagctgcctctgaggccatctgattctaggagactctgcctcgttgaggatattttgaggcctaactacacattcctgcccccagagaggtcacagcctatagcaggctgatgtttctcatgtcacatggcacagaaaggcacattttcgttctcaggctaacaaagagcttcaaaaactattagaagggacagtggctataagagaagaacctcagtcaatgtgtgaaattaactaggaacctggctcctgtttcttttaggtcatgtttttcagcttaggtaaaactagaggctttgataaagcatgacctctagaaatcattgcttttcataaatggaagtgggtttgagttttttctactgattgttagtgcaggtgatgtctacatgcccccagaacatattccatgcaacaaaaaaagcccaggtcaccgtctttgctgggaacttgacttttgtgctcactgaattttaagctttctgacagcagcctggaatcatggagggataaagtacctattagtaagatggaaaaaggtgtttcaggttggagctgcagtctgttgagagtaagctatgggaaggcctgtatacgaggggtggacttttcttctgtaagtgtccagagaccaggcctcctgaagagggcatgggggcttaacttacctggactactgtgtttacaatactcatttatcttgaactcctcctaacccctgagaattgctacatttagtatttgctgagtacttcctagcatcctagggaatcaatagaacattctcccaaccaggctgggtgcggtggctcatgtctgtaatcccagcactttgggaggccaaggtaggcagatcccttgaggccaggagtgcaagactagcctggctgacatggtgaaaccccgtctttactaaaaatacaaaagttagccaggcatggtggtacacacctgtaatcccagctacatgggaggagtaggaggcaggagaattgcttgaacctgggaggtggaggttgctgtgagccgagatcatgccactgcactccagcctgggcgacagagtgagtgagactctgtttaaaaaaaaaaaaaaaaaagaacattctcctaacctggcttcttcctccaggggtgtaattaatcatgtcagtttcctcattgatacacacacacacacactacaatcctgtatccattacttttcaaggtacatttactatttacgtttggggtccttgtctcttttttaatagtgtttcttaaagtcttgtattatatcagagtacagtaacatcccagtcaagagcactctagtaagctctaggaggaaagcgacttccggaaggcagtggagacctgtcctgttggggcagcataggggcagcccctgcctctggtcagttctggcgctcaggctcagggttgcctctgggctgttcttcccagagactgacaaagggctcccataaggcacctgcagagcctgtgagaagctgaagtcaatgttttcctgacaccagttgatctgtgcaggatccattgatttaaccacctgctgtgtggcatgcactgtggtcgatgccaggaacaggaattggaggggcccatgagcatggccagtatcacaggctggaggtgctgctgcgctctgaccgggcctcttggggatgagcccatgtcaaccaccttgcctccgatggggtcgggcccacaggttacctttgtgtgtccatgaccacaccttcctccccgacctcatccaaatctctttcttttccaagcccctgaatccttcagggctgcaggttttgtttaaagcagagctggtgagttgcataggttgttgcgttgggactagatggggtgttcaaagagttgggagttaaaaaacataaagggtatttattaggagaaccaaggagtgtaattctcctgttcttaatatgcggccaggttaatgaatgtcacgtgaatgaaccagaaaaaaatgaagtgtgcccttgatcagctgggttggtgtgcagcaagctgtgtgaccaggggacagcagtggtcctgagggccgtcactgtctgccgtgcagagcccttcctcccacgggggcctacctcacctgtgccaagggcttgtctgtggtcagtgacctggatagatctgaatggggcttctttttcgaggagtcttatggcaggtctctcagtaaagactccattcttgatgatcacacattttggattttccaaatctgtcagagaatgggcttgaggcggggtttgtgggcactagtttcactggtttcatttaccaaaaaggggagcagaagtcaagtatggtggctcatccctgtaatcccagaggcaagagaattgcttgagcccaggagttcgagaccagcctgagcaacataaggagaccccgtctccacaaaaatgaaaaataacattttagtcagacgtggtggcatgcatctgtggtcccagctgcttgggagggtgagatgggagggttgtttgagccctggagttaaagttgcaatgagctgtgattgcaccactgcactctagcctgggtgacagaacgagaccctgtctcaaaaaaaaaaaaaaagaaagaaaaaaaggaaaaaaaaaactcatgcctgtaatcccagcactttggggaccggggtgggcagatcacgaggtcaggagatcaagactatcctagccaacatggtgaaaccccgtttctactaaaaatacaaaaattagccaggtgtggtggcacgtgcctgtaatcccagttactcgggaggctgaggcaggagaatcgcttgaaccagggagtcagaggttgcagtgagctgagatcgtgccactgtactccagcctgggcgacagagtgagactctgtctcaaaccaaaaaaaaggggtggggggcgggggcaggagaacagtgagaggtagggagaggaaaggggattctcgctacacccaaaccagataccatctagaggctagaatctttgggaggctcaaattccctagaaagcaggagaagcttctgtagccctcccgctttcccagtagattaagcccagggcggctccagatgtgtgacatgctctgtgcccaaccagagcccatcataggcagaggaataacacccacaccagaagggccctcggaggtcaccacgtccaagaaccctctttacagatgaggaaactgaggcccagagaggggagagccacctagcgagctggtggcggctagaccaggagagctgtcattccaagcaagcaaaggcaacgagacgagcccagagctgtgctcccatctctttgttagggggcctgggatgccctctcagtgtcattttgtccaggatgatgctccctctcttaagcgattaatgcgcccttgctaaccttttgctatcgctgcctcttcaaaccagaggagttgagagttccgggccggcagaggaaggcgcctgaaaggcccctggccaatgagattagcgcccacgtccagcctggaccctgcggagaggcctctggggtctctgggccgtgcctcggggagaaagagccagaagctcccgtcccgctgaccgcgagccttcctcagcaccgtcccgtttgcccagcgcctcctccaacaggaggccctcaggagccctccctggagtggggacaaaaaggcggggactgggccgagaagggtccggcctttccgaagcccgccaccactgcgtatctccacacagagcctgaaagtggtaaggtggtccaggaaggcttcctccgagagccaggccccccaggtctgagccaccagctcatgtccggcatgcctggggctcccctcctgcctgagggccccagagaggccacacgccaaccttcggggacaggacctgaggacacagagggcggccgccacgcccctgagctgctcaagcaccagcttctaggagacctgcaccaggaggggccgccgctgaagggggcagggggcaaagagaggccggggagcaaggaggaggtggatgaagaccgcgacgtcgatgagtcctccccccaagactcccctccctccaaggcctccccagcccaagatgggcggcctccccagacagccgccagagaagccaccagcatcccaggcttcccagcggagggtgccatccccctccctgtggatttcctctccaaagtttccacagagatcccagcctcagagcccgacgggcccagtgtagggcgggccaaagggcaggatgcccccctggagttcacgtttcacgtggaaatcacacccaacgtgcagaaggagcaggcgcactcggaggagcatttgggaagggctgcatttccaggggcccctggagaggggccagaggcccggggcccctctttgggagaggacacaaaagaggctgaccttccagagccctctgaaaagcagcctgctgctgctccgcgggggaagcccgtcagccgggtccctcaactcaaaggtctgtgtcttgagcttcttcgctccttccctggggacctcccaggcctcccaggctgcgggcactgccactgagcttccaggcctcccgactcctgctgcttctgacgttcctaggacgccactaaatcgacacctgggtgcagctgctccactccctcggcctcctcccgtgctcaggctgtggccgcacgcgcccctcacgcttgcccgccactctgcatgtcaccagcacccccgctccgtgctccccaccttgtttgactctctggccacttgatttgtccacaacggcccatcagcccacaggaggtttggtgggtgccttccaccgacaggatgacgggtgccctcatggtgtctagaactctccaaccctcccatgtaggcataagcagccccactttgcagatgaggaaacggaggctcagagaagtacagtaacttgccgaaggccaatgagtagtaagtgacagagccaggtttgggatccaggtaggttgtctctgaaagacacgcctgtcctgcatcccacaacgcctcccaggaggtgctggagtgtggacgcctaacacagagatgtgcagggcacacacagcaggtgacacacacagcatccagaggtggcccagagctcatgctgtgcctttggcccagtgccctgcccccacccactctgccttgtggcaggaagacaaggagcagacacaagatctccctggtccacatgccaccacctccctctgcagaggacaaggggatcctcatgctggcattggagggggttgagcagggcccaccttgagccctcaggagcacgaccacagcagccctgcagggagggattggtgggaggagagtcccaagtatcagggagaggagagttggtgtcccacaggagacctcagagccacaaggcgagcttgttcataaatttgggacccttagcatttcacagttatttgcagagcccagaaatggatgttactgaagctcacagttgcaagcatctgttaaatttttattagattttacttttagggaaaactttgaaatgctataaagaagcctgtgtttaaaagttaagacagaggctgggggcgatggctcacgcctgtaatctcagcactttgggaggccaaggcaggtggatcatttgaggttaggagttcgagaccagcctggccaacatggtgagaccctgtctctactaaaattacaaaaaattagctgggcgtggtggcgggcacctgtagtcccagctactggggaggctgaagcaggataagtgcttgaacccaggaggcggaggttacagtgagccaagatcacaccactgtaccctaagcctgggcgacagagtgagactctgtctcaaaaaataaaataaaataaagttaagagagaaaaaaatatatcctatatcctttgttaaattccaaaacagtaggggacaaataactgacttgacaggttactacaatatttcctgaaatgatgttttcttgaatactggcctactagaggttcataggtgtgtttggattaaaaaagagttccatggcccagtgactgggggaaaaaaataaaagactaaagtaagttaaacaggcttttctgctgcaggacttgtcagagcctttaatgtactaatggccattgtgaccctctgagaaggtcacagagtgggtttcccaaacttacttgattctacctgctaacatttcctggaggaagtttgggaaatgccgatttagcagattcttttgttgtgccgtggatggtgctggttgatgtgggcaaaacaaagaacacgtgagtcagatccgcctggggctcttactaaagtgcaggttcccaggtgccactttaggcttacagacccagttgtggggtaagcctgggagtcttttagcaggtgattctgccacatagtatagttggaaaacctctgggcatactcattgctggtccctctagaaatccaggtgacaatagccaatgagaagctccaagagacccagttgtccatggggtagagggaatgtgatattgaaaccaaagaagaaaatctatgatcagttttcagcagtgactgtcaagagaaggagaagggtgagttagcgctgatgctggctgacaggtcagcgggttggtttcaccaaggagtgtgatgaaggctgatgttgtctgtgggaatgtatgatggtaactggtttgtagctaatttggggaagcagtgagaattcgtgccctttgaagaccagtaagtggcaagaaacccaccaggcctggctcagggctgggctgggcttggctcgtctcagagcagctggggctggtggccaaagccaccattagtgaggggcaggccctgggggtacaaccagcaactaggggacaaagacaaccctgccagcctctcctattctggaggcgtgtgaccagaaatggagatgggttggtcagcataagatggccaggaaggtggaaatcaggactgctggcaatctagccacatgggcaggggagccgggtggttccaggcagtttccaaggccaagagggtgagcaggcacctcacagggaatcagggccaagcctggctgcagtgtggagacaatgcacccacccccatccttggatcttgcaggaggctgggtcctcactgagctaccaacatccatggccctgaggcttttaaaacacccatccatggagtggggctggtcccagtggggtgaggctgaccctggcagaaacagggcaggagcctgtgggttagggagactgcaccttccttagatagcctccatgccatcatgtccccgtgacagtttctgctgcgtcccctctgcatggtcccaccctcggccagcctgctgccccctcttgccaggttgcgctaatcagtgaccccagtgtgctgtgttgatactaacaatgcgaggcctagcagattcaagggaaaagagaaccaactgggtttccaccagacccaactaaacaaacatggacctatcccagagaaatccagcttcaccacagctggctttctgtgaacagtgaaaatggagtgtgacaagcattcttattttatattttatcagctcgcatggtcagtaaaagcaaagacgggactggaagcgatgacaaaaaagccaaggtaagctgacgatgccacggagctctgcagctggtcaagtttacagagaagctgtgctttatgtctgattcattctcatatataatgtggggagtatttgtcactaaagtacagctgtcatttaaagtgctttgtattttggggcaggcttttaaaaagtccagcatttattagttttgatacttaccccagggaagagcagttggcaggttcatgaagtcatgctcctaattccagctttcttagtgtactttcagtgagaccctgacagtaaatgaaggtgtgtttgaaaaccaaacccaggacagtaaatgaaggtgtgtttgaaaaccagccctaggacagtaaatgaagccatcttctcactgcataaactgcacccagatctttgcccatccttctcagtatttcacttcacccattgtttactgtctcaatgactggggaaatgtctggggaaatgctcccgtaattgcacagtggcgtttttcctggaaaatcccaccatggctctagataagacctatttttcttaaaggtatctaaaatttccagcataaattctgtctgaaacacctgaattttaatcagtactggagcccggagggcatctccagttgccacatagctctgagcattcagtggtgtgttgagggctgctcccggaagtgcctgcagagtcagggctccccagcctcatctagtgaggcagtggaagggcctgtggggatttggagagctggcctgggtctctgaagtgatagtgacagctgcttgtcaatcacggtgcacatttagtgccgggggcagggggcagggaataccagcctcatgcatgcatgcattcatttgttccttccttcattcattcattcagtacacatgggtacaacatccctgccctggagttgcccagagtctagggaggggaaagatctattaccctgggcctcggccagctggggagtgctgctggtggagaggggccgtgtgcagcgagggaaggaggagtcgtcaatacccccaccccagctttgctttcttgtcatcagccccagggccccagcctgtgtccctcctctcccattgctacttcatctcctgggtcctccttaccaagcctgaccacacagagggccttggccgcttccatggggaattggaaagcaataagatagcatcccctagaagcccagtgaagtctgggacaggacccttctctgagctctgacttgctcttggaaacacttcgaggcttagcctccccactttgtttcccaagagtgtgacctgttcccctccaaacacccccttctcctccagggccatgcccacccgtcaaaatcccccacgggcaggacgaactgtgggtgtcagtcaccatctatcctgcatcctggttccagggccccccccagccccgcctccatagggacaggcgtgcagacacccgtccctggctgcttcctcttgtggaatgggttcaaaagtaagcagtgttgtttacactgacaaactgaaaaaaaaagaaaaagagataacattggaggcttggcacagtggctcatgcctgtaatcccagcactttgggaggctaaggtgggaggatgtccccagcccaagagttctagaccagcctgggcaacatagcaagaccccatctcaaaaaaaaaatttaattggccaggcagaggtgggaggatcacttgaacccaaagggtggaggctgcagtgagccgtgatggcaccactgcactccagccagggcaacagagggagaccctgtctctaaaacaaacaaacaaacaaacaaacaaaagagttaacattggccagattaggattcaccagatagtgttaatattagtttgatttgagactttaatcagaaagcacatgtgtggtgggggtgggtgtaacctaagtcaggtagaatctttccaacttggggggggcacactcctgattgtagccatatgagtctgtcagtgtggtggaagagaccatgggttaatgggcaggtaaaaaagcaccttgcctggaattgagtagaaagtaaggcccttcagaccccgtgacacacttggggacattttcttgagtaacatcctaagattcatgtaccttgatgatctccatcaacttactcatgtgaagcacctttaaaccagtcgtctccaaattcaggggcacagtaacatccaacaggctggagaaagaacgtactagaacttccattcctttttcatgtcctcttctaaaagctttgtcagggccaggcgcggtggctcacgcctgtaatcccagcactttgggaggccgagacgggtggatcacgaggtcaggagatcgagaccatcctggctaacacagtgaaaccccatctctactaaaaatacaaaaaaacgagccgggcgtggtggtgggcgcctgtagtcccagctactcgggaggctgaggcaggagaatggcgtgaacccaggaggcagagcttgcagtgagccgagattgcaccactgcagtccagcctgggcgacagagcgagactccgtctcaaaaaagaaaaagaaaaagaaaaagaactgtgattggggaggacggtcactttcctgttcttactgatcagaagggatattaagggtacctgattcaaacagcctggagatcactgctttcaaccattacctgccttatttatttttagttactgtccttttttcagtttgtttccctcctccatgtgctgacttttattttgattttatttatgtttatgtttaagacatccacacgttcctctgctaaaaccttgaaaaataggccttgccttagccccaaacaccccactcctggtagctcagaccctctgatccaaccctccagccctgctgtgtgcccagagccaccttcctctcctaaacacgtctcttctgtcacttcccgaactggcagttctggagcaaaggagatgaaactcaaggtaaggaaaccacctttgaaaagaaccaggctgctctgctgtggtttgcaaatgtggggtttgtttatttgttttttagcctcaaagacctttcttcaaatgagttctggcatagaagcaccgtgtaaaatagttagaattctgggcaaaggggaaaagagagctgggggccatccctctcagcaccccacaggctctcatagcagcagctcctaagacacctggtgggaccttggtttcgaaatcgctactctaaggctgggcacggtggctcacacctgtaatcccagctctttaggaggccgaggagggtggatcacctgagatcaggagttcgagaccagcctggctaacatggcaaaaccctgtctctactaaaaatacaaaaattagccgggcgtggtgttatgcgtggtggtaatcgcagctactcgggaggctgaggcacaaggattgcttgaaccccagaggcagaggttgtagttagctccagcttgggcgacagagcaagaccctgtcgcaaaaattgtttaaaaaacaaacccaaaattgctactctcattgggttcctttgcccattcctgattttggcaagagaaatgcttccagattgccctgatctgggtaggacagcatcacgccatagcaacactgccccgtgagctcactgccccctcaactagcttgtggtccttggttaatgtcagtttcttttttgagtttgtgttatgtctaagggtcatctgctgggtaacggaacccagggactgccctagtccctagactgtgccatgcccgactctgccagctttgtcagtgatgctggtgctcgcctcctcgggtgctcgcctggtctgagcacacccaaggagttcttgaggccttagggttgtttgcgagagaatgaaagaacacgacctagctctctttagcatccttggtcaggttcaacactgcccccaggggcctctggtggagccaaccaccatcagccaaataaatccataattagagtcagaaaatggatgtctgcatatgtgtagtgcactaatgtcctgccgatgattgacatggagtggagagtgacctgatcattgctgtgagctctgctggccttggcacaactcatgctgataactaatgcacacagttcctctgggaggaaatgtcctcagggaacttggagtttgggtggggatgtgggtttgtgtgcccagcaagcccttgtggttgtagcagacactagtggcatctaggaggcaaagggtcaccccagtcttagccacgttttgagtcaaggtggcggagtggggctggtgttgactcttggtggcagtaacttttcccaatggtgaaaaacccctctatcatgtttcatttacagggggctgatggtaaaacgaagatcgccacaccgcggggagcagcccctccaggccagaagggccaggccaacgccaccaggattccagcaaaaaccccgcccgctccaaagacaccacccagctctggtaagaagaacgttctcttgaatcttagaggaagctgaagctctcagaggtacagccttcattttaggaggccttaggccactgagaatgaataacccctggcagctggtcagcagcttgcagtttactaagcactggagtcttcattgccttctcagtccttttgatttctgaggcaaatgttgaatccctacctttttttttttttttcttttgagacagagtttcgcttttgttatccaggccggagtgcagtggtgtgatctcagctcactgcatcctccacctcccaggttcaagcgattctcctacctcagcctccctagtagctgggattacaggcacctgccactatgcccggctaattttttgtatttttagtagagacagggtttcaccatgttggccaggctggtctcgaacgcctgacctcaggtgatccacctgcctcggcctcccaaagtgctgggattacaggcatgagccaccactcccagcctgaatcctcactttttatcaatgaagaaattgaggctgattctgcagcatgataaaaaaaaatacagaaaaaggaaaaaaaagaaagaaatcgagcctctgagagtttgcttgactgagtctaaccagctcattttaaacccgaggaaaatgcagtcacatgactactaagtggcagctctcggagcctctctggccccaagtccagggttccatagaggcagccccagcatggcatgttttcagtccccaaatgagactctggagacaaatgtctctggagacagagcagcagcctggataagtcacaatgggtgacgtcactcagggctcaacccctgggcagcttaacttgctagggacgttaggagtctgctgcaaaacctgagggtcttagctgagcagtcacaggctgggcccgttgccctgggctcctgtgagtaaaacccagtcaattttgagtacccagtaaggcatccattgagttattttgcagccaggagtgctattaagaacagtcgcggctgggcgtggtggctcatgcctgtaatcccagcactttgggaggccaaggtgggcggatcacctgaggtcaggagttcgagaccagcttggccaacatggcaaaaccccgtctctaataaaaatacaaaataattagctgggcgtggtggcgggcgcctgtaatcccagcttctcaggagggtgaggaaggagaatcacttgaacccaggaggcagaggttgcagtgagctgagatcgcaccattgcactccagcctggatgacaaaagtgagattccttctcaaaaaaaaaaaaaaaaaaacagtcgtcctctttggggattagggacagcctgcctgcctgcccgagcacttctctcttccattgccccagtgaagtattccaggcccctgggtttagactctgcaccatgtaggggtgtctgacctgcacttgctccttggtggcacgggcagcctatggcacttgctgcgggctgtgaccaaagcctggcctggatcttggatcttggtgactctgcttctccctggcctgagggagctgcccagagcctgcccaccacctgctgcgtgtctttgcggtggcatttctcgcacacatgccgtgcggtggcacccccaaggatggccattcactaaggcccattgtttttgtcttttcgcttcgtgttttctggcctggtgtttttctcatatacatgtgatccagggataattcccagaattttgacaggattttaagtagcgtttggatcctgctgtttttttttcacttaacatcgggccagttgactcacactctgttttttgttgttgtttttttgagacggagtctcactgtgtcacccaggctgaagtgcagtggcacaatcttggcatactgcaacctctgcttcccaaattcaagcagttttcctgcctcagcctcctgagtagctgggactacaggcacaggccaccacgccctgctaatttttgtatttttagtaaagacagggtttcaccattttggccagcctagtctcgaactcctgacctcaagtgatccgcccacctcggcctcccaaagtgctgggattacaggggactcacactttgtaacaacctgaaacaacgtgatgcatttccctttgggtcttacctgctcttcggtggctgcctgcaggtggagagaccctcccccttgggcccctcgaccttgtttcagaatggggcccctgctgggccagctgtgggtgcctgccacgtgaaggactcattaaggccctgtttaagcctgatgataataaggctttcgtggatttttctctttaagcgactaagcaagtccagagaagaccaccccctgcagggcccagatctgagagaggtactcgggagcctacttcgctgggagcagcctccctttgcgtgtgtggccattcactggcttgtgtttctagagccgggaggacccttttctgcaatgcagggttcacacagggttcgcagcctgaagatggagcagtccgaattctcttccctgtgcagtttgcgcagctgtgtttgtctgatgggctttctaatcctgtgtgctctccttgacttcagggacaatggcattacaggcatgagccaccatgcctggctgtctccctatgtttcagatgaagacataggcttaaggaggtcaggtgacttgcccacgaccactctgtaaataagaggcatgaaaagtatttggagccaccaccaccaagcccactggtcaccctgggtctctgaagtcagggaggcaggaggatgggaggtctgaggaggcagagaggctgagcctggaggccctggaggccgaggccccatctgttgtttccttatgtggaaaataagaggcttcatttgtcctattgccacagagcgtactacttcaggaacatccaagacatggaaatccgcagggcacggtggctcacgtctataatcccggcactttgggaggttgaggtgggagaatcgcttgaggccagaagttcaagaccagcctgagcaacatagtcagaccccgtctctataaaaaacattatttttaaaaaagacatggaagtcaaattctaaaaactggtgctggctgggtgcggtggctcatgcctataatcccagcactttgggaggccgaggcgggtggatcacctgaggtcaggagttcaagaccagcctggccaacatggtaaaacctctactaaagaaatctttactgaaaatacaaaaatccagtctctactaaaataagtctctactaaaaatacaaaaattagccaggcgtggtgctgcacacctgtaatatcagctactcgggaggctgaggcaggagactcgcttgatcccatgcagcggaggttgcagtgagccgagatcacgccattgcactccagcctgggcatcagaataagactccgtctcaaaaaaaaaaccacaaaaaaacaaaacaacaacaaaagaaaactagtgcttattcgtcactggccaagctgcccattggctacatgggtgcttcaaagagctgcccttctccaggtctggccagcaggtatgtgttacagcaaatgcctggggcagcggcaggggcattgctgcgggaagcttctggacttgcaggaaagctaagttctcagactgcaggggagctaagcacacctcggcacagggtgaggcctgcggttctcagacttcagtctttgtggagcttgagaaaaatgaggctttgcaggtcccacccctagagattctgctctatccactcttgaaggggatcgagaaatttgcattttgcaactcccactttcctccttgaaagctccggagattctgacgcagggttccgtgggccacactttggaaaatacagacccatgagatagaataccagactgttgaagtgtaacgggggcctgggaagtgcagtaacagaagcaagtttgagggtaaaggacacccagaggagggagggacagcatctgcatggagaggagaagagaccccccagcagcttccagggtgttggaagggtgcgctagtaactgctatgcatggcaggtggggaactgtacgtcagggcacagcagcatgaagcggtatggctcgtgtggacagctagggacaggcaggcgtggagcaggcatcctgttctgaaggccaaatcccacagaggagccagggtgctggcaggagccctgaactagccgaacagctgaacagctgaacattcaccctgtggggaaagggtcagaagcgtccaggcttgagggcacagctgggtctcgtcactgcatcacccttatttaggataaaggccctgaagaattgtattagaggttggcaaagcatatctaccacctcctggagccacgctggccgcagggattataattatttccattttcaaattaaggcctctgagctcagagaggggaagttacttgtctgaggccacacagcttgttggagcccatctcttgacccaaagactgtggagccgagttggccacctctctgggagcgggtattggatggtggttgatggttttccattgctttcctgggaaaggggtgtctctgtccctaagcaaaaaggcagggaggaagagatgcttccccagggcagccgtctgctgtagctgcgcttccaacctggcttccacctgcctaacccagtggtgagcctgggaatggacccacgggacaggcagcccccagggccttttctgaccccacccactcgagtcctggcttcactcccttccttccttcccaggtgaacctccaaaatcaggggatcgcagcggctacagcagccccggctccccaggcactcccggcagccgctcccgcaccccgtcccttccaaccccacccacccgggagcccaagaaggtggcagtggtccgtactccacccaagtcgccgtcttccgccaagagccgcctgcagacagcccccgtgcccatgccagacctgaagaatgtcaagtccaagatcggctccactgagaacctgaagcaccagccgggaggcgggaaggtgagagtggctggctgcgcgtggaggtgtggggggctgcgcctggaggggtagggctgtgcctggaagggtagggctgcgcctggaggtgcgcggttgagcgtggagtcgtgggactgtgcatggaggtgtggggctccccgcacctgagcacccccgcataacaccccagtcccctctggaccctcttcaaggaagttcagttctttattgggctctccactacactgtgagtgccctcctcaggcgagagaacgttctggctcttctcttgccccttcagcccctgttaatcggacagagatggcagggctgtgtctccacggccggaggctctcatagtcagggcacccacagcggttccccacctgccttctgggcagaatacactgccacccataggtcagcatctccactcgtgggccatctgcttaggttgggttcctctggattctggggagattgggggttctgttttgatcagctgattcttctgggagcaagtgggtgctcgcgagctctccagcttcctaaaggtggagaagcacagacttcgggggcctggcctggatccctttccccattcctgtccctgtgcccctcgtctgggtgcgttagggctgacatacaaagcaccacagtgaaagaacagcagtatgcctcctcactagccaggtgtgggcgggtgggtttcttccaaggcctctctgtggccgtgggtagccacctctgtcctgcaccgctgcagtcttccctctgtgtgtgctcctggtagctctgcgcatgctcatcttcttataagaacaccatggcagctgggcgtagtggctcacgcctataatcccagcactttgggaggctgaggcaggcagatcacgaggtcaggagttcgagaccaacctgaccaacagggtgaaacctcgtctctactaaaaatacaaaaatacctgggcgtggtggtggtgcgcgcctataatcccagctactcaggaggctgaggcaggagaatcgcttgaacccaggaggcagaggttgcagtgagccgagatagtgccactgcactccagtttgagcaacagagcgagactctgtctcaaaacaaaataaaacaaaccaaaaaaacccaccatggcttagggcccagcctgatgacctcatttttcacttagtcacctctctaaaggccctgtctccaaatagagtcacattctaaggtacgggggtgttggggaggggggttagggcttcaacatgtgaatttgcggggaccacaattcagcccaggaccccgctcccgccacccagcactggggagctggggaagggtgaagaggaggctgggggtgagaaggaccacagctcactctgaggctgcagatgtgctgggccttctgggcactgggcctcggggagctagggggctttctggaaccctgggcctgcgtgtcagcttgcctcccccacgcaggcgctctccacaccattgaagttcttatcacttgggtctgagcctggggcatttggacggagggtggccaccagtgcacatgggcaccttgcctcaaaccctgccacctccccccacccaggatcccccctgcccccgaacaagcttgtgagtgcagtgtcacatcccatcgggatggaaatggacggtcgggttaaaagggacgcatgtgtagaccctgcctctgtgcatcaggcctcttttgagagtccctgcgtgccaggcggtgcacagaggtggagaagactcggctgtgccccagagcacctcctctcatcgaggaaaggacagacagtggctcccctgtggctgtggggacaagggcagagctccctggaacacaggagggagggaaggaagagaacatctcagaatctccctcctgatggcaaacgatccgggttaaattaaggtccggccttttcctgctcaggcatgtggagcttgtagtggaagaggctctctggaccctcatccaccacagtggcctggttagagaccttggggaaataactcacaggtgacccagggcctctgtcctgtaccgcagctgagggaaactgtcctgcgcttccactggggacaatgcgctccctcgtctccagactttccagtcctcattcggttctcgaaagtcgcctccagaagccccatcttgggaccaccgtgactttcattctccagggtgcctggccttggtgctgcccaagaccccagaggggccctcactggcctttcctgccttttctcccattgcccacccatgcacccccatcctgctccagcacccagactgccatccaggatctcctcaagtcacataacaagcagcacccacaaggtgctcccttccccctagcctgaatctgctgctccccgtctggggttccccgcccatgcacctctgggggcccctgggttctgccataccctgccctgtgtcccatggtggggaatgtccttctctccttatctcttcccttcccttaaatccaagttcagttgccatctcctccaggaagtcttcctggattcccctctctcttcttaaagcccctgtaaactctgaccacactgagcatgtgtctgctgctccctagtctgggccatgagtgagggtggaggccaagtctcatgcatttttgcagcccccacaagactgtgcaggtggccggccctcattgaatgcggggttaatttaactcagcctctgtgtgagtggatgattcaggttgccagagacagaaccctcagcttagcatgggaagtagcttccctgttgaccctgagttcatctgaggttggcttggaaggtgtgggcaccatttggcccagttcttacagctctgaagagagcagcaggaatggggctgagcagggaagacaactttccattgaaggcccctttcagggccagaactgtccctcccaccctgcagctgccctgcctctgcccatgaggggtgagagtcaggcgacctcatgccaagtgtagaaaggggcagacgggagccccaggttatgacgtcaccatgctgggtggaggcagcacgtccaaatctactaaagggttaaaggagaaagggtgacttgacttttcttgagatattttgggggacgaagtgtggaaaagtggcagaggacacagtcacagcctcccttaaatgccaggaaagcctagaaaaattgtctgaaactaaacctcagccataacaaagaccaacacatgaatctccaggaaaaaagaaaaagaaaaatgtcatacagggtccatgcacaagagcctttaaaatgacccgctgaagggtgtcaggcctcctcctcctggactggcctgaaggctccacgagcttttgctgagacctttgggtccctgtggcctcatgtagtacccagtatgcagtaagtgctcaataaatgtttggctacaaaagaggcaaagctggcggagtctgaagaatccctcaaccgtgccggaacagatgctaacaccaaagggaaaagagcaggagccaagtcacgtttgggaacctgcagaggctgaaaactgccgcagattgctgcaaatcattgggggaaaaacggaaaacgtctgttttcccctttgtgcttttctctgttttcttctttgtgcttttctctgttttcaggatttgctacagtgaacatagattgctttggggccccaaatggaattattttgaaaggaaaatgcagataatcaggtggccgcactggagcaccagctgggtaggggtagagattgcaggcaaggaggaggagctgggtggggtgccaggcaggaagagcccgtaggccccgccgatcttgtgggagtcgtgggtggcagtgttccctccagactgtaaaagggagcacctggcgggaagagggaattcttttaaacatcattccagtgcccgagcctcctggacctgttgtcatcttgaggtgggcctcccctgggtgactctagtgtgcagcctggctgagactcagtggccctgggttcttactgctgacacctaccctcaacctcaaccactgcggcctcctgtgcaccctgatccagtggctcattttccactttcagtcccagctctatccctatttgcagtttccaagtgcctggtcctcagtcagctcagacccagccaggccagcccctggttcccacatcccctttgccaagctcatccccgccctgtttggcctgcgggagtgggagtgtgtccagacacagagacaaaggaccagcttttaaaacattttgttggggccaggtgtggtggctcacacctaatcccaacacctggggaggccaaggcagaaggatcacttgagtccaggagttcaagaccagcctgggcaacatagggagaccctgtctctacaattttttttttaattagctgggcctgttggcactctcctgtagttccagctactctagaggctgaggtgggaggactgcttgagcctgggaggtcagggctgcaatgagccatgttcacaccactgaacgccagcctgggcgagaccctgtatcaaaaaagtaaagtaaaatgaatcctgtacgttatattaaggtgccccaaattgtacttagaaggatttcatagttttaaatacttttgttatttaaaaaattaaatgactgcagcatataaattaggttcttaatggaggggaaaaagagtacaagaaaagaaataagaatctagaaacaaagataagagcagaaataaaccagaaaacacaaccttgcactcctaacttaaaaaaaaaaatgaagaaaacacaaccagtaaaacaacatataacagcattaagagctggctcctggctgggcgcggtggcgcatgcctgtaatcccaacactttgggaggccgatgctggaggatcacttgagaccaggagttcaaggttgcagtgagctatgatcataccactacaccctagcctgggcaacacagtgagactgagactctattaaaaaaaaaatgctggttccttccttatttcattcctttattcattcattcagacaacatttatggggcacttctgagcaccaggctctgtgctaagagcttttgcccccagggtccaggccaggggacaggggcaggtgagcagagaaacagggccagtcacagcagcaggaggaatgtaggatggagagcttggccaggcaaggacatgcagggggagcagcctgcacaagtcagcaagccagagaagacaggcagacccttgtttgggacctgttcagtggcctttgaaaggacagcccccacccggagtgctgggtgcaggagctgaaggaggatagtggaacactgcaacgtggagctcttcagagcaaaagcaaaataaacaactggaggcagctggggcagcagagggtgtgtgttcagcactaaggggtgtgaagcttgagcgctaggagagttcacactggcagaagagaggttggggcagctgcaagcctctggacatcgcccgacaggacagagggtggtggacggtggccctgaagagaggctcagttcagctggcagtggccgtgggagtgctgaagcaggcaggctgtcggcatctgctggggacggttaagcaggggtgagggcccagcctcagcagcccttcttggggggtcgctgggaaacatagaggagaactgaagaagcagggagtcccagggtccatgcagggcgagagagaagttgctcatgtggggcccaggctgcaggatcaggagaactggggaccctgtgactgccagcggggagaagggggtgtgcaggatcatgcccagggaagggcccaggggcccaagcatgggggggcctggttggctctgagaagatggagctaaagtcactttctcggaggatgtccaggccaatagttgggatgtgaagacgtgaagcagcacagagcctggaagcccaggatggacagaaacctacctgagcagtggggctttgaaagccttggggcggggggtgcaatattcaagatggccacaagatggcaatagaatgctgtaactttcttggttctgggccgcagcctgggtggctgcttccttccctgtgtgtattgatttgtttctcttttttgagacagagtcttgctgggttgcccaggctggagtgcagtggtgcgatcatagctcactgcagccttgaagtcctgagctcaagagatccttccacctcagcctcctgagtagttgggaccacaggcttgcaccacagtgcccaactaatttcttatattttttgtagagatggggtttcactgtgtcgcccaggatggtcttgaactcctgggctcaagtgatcctcctgcctcagcctcgcaaattgctgggattacaggtgtgagccaccatgcccgaccttctctttttaagggcgtgtgtgtgtgtgtgtgtgtgtgggcgcactctcgtcttcaccttcccccagccttgctctgtctctacccagtcacctctgcccatctctccgatctgtttctctctccttttacccctctttcctccctcctcatacaccactgaccattatagagaactgagtattctaaaaatacattttatttatttattttgagacagagtctcactctgtcacccaggctggagtgcagtggtgcaatctcggctcactgcaacctccgcctcccaggttgaagcaactctcctgcctcagcctccctagtagctgggattacaagcacacaccaccatgcctagcaaatttttatatttttagtagaggaggagtgtcaccatgtttgccaagctggtctcaaactcctggcctcaggtgatctgcctaccttggtctcccaaagtgctgggattacaggtgtgagccaccacgcctgcccttaaaaatacattatatttaatagcaaagccccagttgtcactttaaaaagcatctatgtagaacatttatgtggaataaatacagtgaatttgtacgtggaatcgtttgcctctcctcaatcagggccagggatgcaggtgagcttgggctgagatgtcagaccccacagtaagtggggggcagagccaggctgggaccctcctctaggacagctctgtaactctgagaccctccaggcatcttttcctgtacctcagtgcttctgaaaaatctgtgtgaatcaaatcattttaaaggagcttgggttcatcactgtttaaaggacagtgtaaataattctgaaggtgactctaccctgttatttgatctcttctttggccagctgacttaacaggacatagacaggttttcctgtgtcagttcctaagctgatcaccttggacttgaagaggaggcttgtgtgggcatccagtgcccaccccgggttaaactcccagcagagtattgcactgggcttgctgagcctggtgaggcaaagcacagcacagcgagcaccaggcagtgctggagacaggccaagtctgggccagcctgggagccaactgtgaggcacggacggggctgtggggctgtggggctgcaggcttggggccagggagggagggctgggctctttggaacagccttgagagaactgaacccaaacaaaaccagatcaaggtctagtgagagcttagggctgctttgggtgctccaggaaattgattaaaccaagtggacacacacccccagccccacctcaccacagcctctccttcagggtcaaactctgaccacagacatttctcccctgactaggagttccctggatcaaaattgggagcttgcaacacatcgttctctcccttgatggtttttgtcagtgtctatccagagctgaagtgtaatatatatgttactgtagctgagaaattaaatttcaggattctgatttcataatgacaaccattcctcttttctctcccttctgtaaatctaagattctataaacggtgttgacttaatgtgacaattggcagtagttcaggtctgctttgtaaatacccttgtgtctattgtaaaatctcacaaaggcttgttgccttttttgtggggttagaacaagaaaaagccacatggaaaaaaaatttcttttttgtttttttgtttgcttgtttttttgagacagagtttcactctgtcgcccaggctggagtgcagtggtgcgatctccgcccactgcaagctccacctcccgggttcatgctattctcctgtctcagcctcccaagtagctgggactgcaggtgcccgccaccacacctggctaatttttttgtatttttagtagagacggggtttcaccgtgttagccaggatggtctcaatctcctgacctcgtcatctgcctgcctcggcctcccaaagtgctgagattacaggcgtgagccaccgtgcccggccagaaaaaaacatttctaagtatgtggcagatactgaattattgcttaatgtcctttgattcatttgtttaatttctttaatggattagtacagaaaacaaagttctcttccttgaaaaactggtaagttttctttgtcagataaggagagttaaataacccatgacatttccctttttgcctcggcttccaggaagctcaaagttaaatgtaatgatcactcttgtaattatcagtgttgatgcccttcccttcttctaatgttactctttacattttcctgctttattattgtgtgtgttttctaattctaagctgttcccactcctttctgaaagcaggcaaatcttctaagccttatccactgaaaagttatgaataaaaaatgatcgtcaagcctacaggtgctgaggctactccagaggctgaggccagaggaccacttgagcccaggaatttgagacctgggctgggcagcatagcaagactctatctccattaaaactatttttttttatttaaaaaataatccgcaaagaaggagtttatgtgggattccttaaaatcggagggtggcatgaattgattcaaagacttgtgcagagggcgacagtgactccttgagaagcagtgtgagaaagcctgtcccacctccttccgcagctccagcctgggctgaggcactgtcacagtgtctccttgctggcaggagagaatttcaacattcaccaaaaagtagtattgtttttattaggtttatgaggctgtagccttgaggacagcccaggacaactttgttgtcacatagatagcctgtggctacaaactctgagatctagattcttctgcggctgcttctgacctgagaaagttgcggaacctcagcgagcctcacatggcctccttgtccttaacgtggggacggtgggcaagaaaggtgatgtggcactagagatttatccatctctaaaggaggagtggattgtacattgaaacaccagagaaggaattacaaaggaagaatttgagtatctaaaaatgtaggtcaggcgctcctgtgttgattgcagggctattcacaatagccaagatttggaagcaacccaagtgtccatcaacagacaaatggataaagaaaatgtggtgcatatacacaatggaatactattcagccatgaaaaagaatgagaatctgtcatttgaaacaacatggatggaactggaggacattatgttaagtgaaataagccagacagaaggacagacttcacatgttctcacacatttgtgggagctaaaaattaaactcatggagatagagagtagaaggatggttaccagaggctgaggagggtggaggggagcagggagaaagtagggatggttaatgggtacaaaaacgtagttagcatgcatagatctagtattggatagcacagcagggtgacgacagccaacagtaatttatagtacatttaaaaacaactaaaagagtgtaactggactggctaacatggtgaaaccccgtctctactaaaaatacaaaaattagctgggcacggtggctcacgcctgtaatcccagcactttgggaggccgaggcgggccgatcacgaggtcaggagatcgagaccatcctagctaacatggtgaaaccccgtctctactacaaatacaaaaaaaagaaaaaattagccgggcatggtggtgggcgcctgtagtcccagctactcgggaggctgaggcaggagaatggcgtgaacccgggaggcggagcttgcagtgagccgagatcgcgccactgcactccagcctgggcgacaaggcaagattctatctcaaaaaaataaaaataaaataaaataaaataataaaataaaataaaataaaataaaataaaataaataaaataaaatgtataattggaatgtttataacacaagaaatgataaatgcttgaggtgatagataccccattcaccgtgatgtgattattgcacaatgtatgtctgtatctaaatatctcatgtaccccacaagtatatacacctactatgtacccatataaatttaaaattaaaaaattataaaacaaaaataaataagtaaattaaaatgtaggctggacaccgtggttcacgcctgtaatcccagtgctttgtgaggctgaggtgagagaatcacttgagcccaggagtttgagaccggcctgggtgacatagcgagaccccatcatcacaaagaatttttaaaaattagctgggcgtggtagcacataccggtagttccagctacttgggagaccgaggcaggaggattgcttgagcccaggagtttaaggctgcagtgagctacgatggcgccactgcattccagcctgggtgacagagtgagagcttgtctctattttaaaaataataaaaagaataaataaaaataaattaaaatgtaaatatgtgcatgttagaaaaaatacacccatcagcaaaaagggggtaaaggagcgatttcagtcataattggagagatgcagaataagccagcaatgcagtttcttttattttggtcaaaaaaaataagcaaaacaatgttgtaaacacccagtgctggcagcaatgtggtgaggctggctctctcaccagggctcacagggaaaactcatgcaacccttttagaaagccatgtggagagttgtaccgagaggttttagaatatttataactttgacccagaaattctattctaggactctgtgttatgaaaataacccatcatatggaaaaagctcctttcagaaagaggttcatgggaggctgtttgtattttttttttctttgcatcaaatccagctcctgcaggactgtttgtattattgaagtacaaagtggaatcaatacaaatgttggatagcaggggaacaatattcacaaaatggaatgggacatagtattaaacatagtgcttctgatgaccgtagaccatagacaatgcttaggatatgatatcacttcttttgttgttttttgtattttgagacgaagtctcattctgtcacccaggctggagttcagtggcgccatctcagctcactgcaacctccatctcccgggttcaagctattctccttcctcaacctcccgagtagctgggttgcgcaccaccatgcctggctaacttttgtatttttagtacagacggggtttcaccacgttggccaggctgctcttgaactcctgacgtcaggtgatccaccagccttgacctcccaaagtgctaggattacaggagccactgtacccagcctaggatatgatatcacttcttagagcaagatacaaaattgcatgtgcacaataattctaccaagtataggtatacaggggtagttatatataaatgagacttcaaggaaatacaacaaaatgcaatcgtgattgtgttagggtggtaagaaaacggtttttgctttgatgagctctgttttttaaaatcgttatattttctaataaaaatacatagtcttttgaaggaacataaaagattatgaagaaatgagttagatattgattcctattgaagattcagacaagtaaaattaaggggaaaaaaaacgggatgaaccagaagtcaggctggagttccaaccccagatccgacagcccaggctgatggggcctccagggcagtggtttccacccagcattctcaaaagagccactgaggtctcagtgccattttcaagatttcggaagcggcctgggcacggctggtccttcactgggatcaccacttggcaattatttacacctgagacgaatgaaaaccagagtgctgagattacaggcatggtggcttacgcttgtaatcggctttgggaagccgaggtgggctgattgcttgagcccaggagtttcaaactatcctggacaacatagcatgacctcgtctctacaaaaaatacaaaaaatttgccaggtgtggtggcatgtgcctgtggtcccagctacttgggaggctgaagtaggagaatcccctgagccctgggaagtcgaggctgcactgagccgtgatggtgtcactgcactccagcctgggtgacaaagtgagaccctatctcacaaagaaaaaaaacaaaacaaaaaacccaaagcacactgtttccactgtttccagagttcctgagaggaaaggtcaccgggtgaggaagacgttctcactgatctggcagagaaaatgtccagtttttccaactccctaaaccatggttttctatttcatagttcttaggcaaattggtaaaaatcatttctcatcaaaacgctgatattttcacacctccctggtgtctgcagaaagaaccttccagaaatgcagtcgtgggagacccatccaggccacccctgcttatggaagagctgagaaaaagccccacgggagcatttgctcagcttccgttacgcacctagtggcattgtgggtgggagagggctggtgggtggatggaaggagaaggcacagcccccccttgcagggacagagccctcgtacagaagggacaccccacatttgtcttccccacaaagcggcctgtgtcctgcctacggggtcagggcttctcaaacctggctgtgtgtcagaatcaccaggggaacttttcaaaactagagagactgaagccagactcctagattctaattctaggtcagggctaggggctgagattgtaaaaatccacaggtgattctgatgcccggcaggcttgagaacagccgcagggagttctctgggaatgtgccggtgggtctagccaggtgtgagtggagatgccggggaacttcctattactcactcgtcagtgtggccgaacacatttttcacttgacctcaggctggtgaacgctcccctctggggttcaggcctcacgatgccatccttttgtgaagtgaggacctgcaatcccagcttcgtaaagcccgctggaaatcactcacacttctgggatgccttcagagcagccctctatcccttcagctcccctgggatgtgactcgacctcccgtcactccccagactgcctctgccaagtccgaaagtggaggcatccttgcgagcaagtaggcgggtccagggtggcgcatgtcactcatcgaaagtggaggcgtccttgcgagcaagcaggcgggtccagggtggcgtgtcactcatccttttttctggctaccaaaggtgcagataattaataagaagctggatcttagcaacgtccagtccaagtgtggctcaaaggataatatcaaacacgtcccgggaggcggcagtgtgagtaccttcacacgtcccatgcgccgtgctgtggcttgaattattaggaagtggtgtgagtgcgtacacttgcgagacactgcatagaataaatccttcttgggctctcaggatctggctgcgacctctgggtgaatgtagcccggctccccacattcccccacacggtccactgttcccagaagccccttcctcatattctaggagggggtgtcccagcatttctgggtcccccagcctgcgcaggctgtgtggacagaatagggcagatgacggaccctctctccggaccctgcctgggaagctgagaatacccatcaaagtctccttccactcatgcccagccctgtccccaggagccccatagcccattggaagttgggctgaaggtggtggcacctgagactgggctgccgcctcctcccccgacacctgggcaggttgacgttgagtggctccactgtggacaggtgacccgtttgttctgatgagcggacaccaaggtcttactgtcctgctcagctgctgctcctacacgttcaaggcaggagccgattcctaagcctccagcttatgcttagcctgcgccaccctctggcagagactccagatgcaaagagccaaaccaaagtgcgacaggtccctctgcccagcgttgaggtgtggcagagaaatgctgcttttggcccttttagatttggctgcctcttgccaggagtggtggctcgtgcctgtaattccagcactttgggagactaaggcgggaggttcgcttgagcccaggagttcaagaccagcctgggcaacaatgagacccctgtgtctacaaaaagaattaaaattagccaggtgtggtggcacgcacctgtagtcccagctacttgggaggctgaggtgggaggattgcctgagtccgggaggcggaagttgcaaggagccatgatcgcgccactgcacttcaacctaggcaacagagtgagactttgtctcaaaaaacaatcatataataattttaaaataaatagatttggcttcctctaaatgtccccggggactccgtgcatcttctgtggagtgtctccgtgagattcgggactcagatcctcaagtgcaactgacccacccgataagctgaggcttcatcatcccctggccggtctatgtcgactgggcacccgaggctcctctcccaccagctctcttggtcagctgaaagcaaactgttaacaccctggggagctggacgtatgagacccttggggtgggaggcgttgatttttgagagcaatcacctggccctggctggcagtaccgggacactgctgtggctccggggtgggctgtctccagaaaatgcctggcctgaggcagccacccgcatccagcccagagggtttattcttgcaatgtgctgctgcttcctgccctgagcacctggatcccggcttctgccctgaggccccttgagtcccacaggtagcaagcgcttgccctgcggctgctgcatggggctaactaacgcttcctcaccagtgtctgctaagtgtctcctctgtctcccacgccctgctctcctgtccccccagtttgtctgctgtgaggggacagaagaggtgtgtgccgcccccacccctgcccgggcccttgttcctgggattgctgttttcagctgtttgagctttgatcctggttctctggcttcctcaaagtgagctcggccagaggaggaaggccatgtgctttctggttgaagtcaagtctggtgccctggtggaggctgtgctgctgaggcggagctggggagagagtgcacacgggctgcgtggccaacccctctgggtagctgatgcccaaagacgctgcagtgcccaggacatctgggacctccctggggcccgcccgtgtgtcccgcgctgtgttcatctgcgggctagcctgtgacccgcgctgtgctcgtctgcgggctagcctgtgtcccgcgctctgcttgtctgcggtctagcctgtgacctggcagagagccaccagatgtcccgggctgagcactgccctctgagcaccttcacaggaagcccttctcctggtgagaagagatgccagcccctggcatctgggggcactggatccctggcctgagccctagcctctccccagcctgggggccccttcccagcaggctggccctgctccttctctacctgggacccttctgcctcctggctggaccctggaagctctgcagggcctgctgtccccctccctgccctccaggtatcctgaccaccggccctggctcccactgccatccactcctctcctttctggccgttccctggtccctgtcccagcccccctccccctctcacgagttacctcacccaggccagagggaagagggaaggaggccctggtcataccagcacgtcctcccacctccctcggccctggtccaccccctcagtgctggcctcagagcacagctctctccaagccaggccgcgcgccatccatcctccctgtcccccaacgtccttgccacagatcatgtccgccctgacacacatgggtctcagccatctctgccccagttaactccccatccataaagagcacatgccagccgacaccaaaataattcgggatggttccagtttagacctaagtggaaggagaaaccaccacctgccctgcaccttgttttttggtgaccttgataaaccatcttcagccatgaagccagctgtctcccaggaagctccagggcggtgcttcctcgggagctgactgataggtgggaggtggctgcccccttgcaccctcaggtgaccccacacaaggccactgctggaggccctggggactccaggaatgtcaatcagtgacctgccccccaggccccacacagccatggctgcatagaggcctgcctccaagggacctgtctgtctgccactgtggagtccctacagcgtgccccccacaggggagctggttctttgactgagatcagctggcagctcagggtcatcattcccagagggagcggtgccctggaggccacaggcctcctcatgtgtgtctgcgtccgctcgagcttactgagacactaaatctgttggtttctgctgtgccacctacccaccctgttggtgttgctttgttcctattgctaaagacaggaatgtccaggacactgagtgtgcaggtgcctgctggttctcacgtccgagctgctgaactccgctgggtcctgcttactgatggtctttgctctagtgctttccagggtccgtggaagcttttcctggaataaagcccacgcatcgaccctcacagcgcctcccctctttgaggcccagcagataccccactcctgcctttccagcaagatttttcagatgctgtgcatactcatcatattgatcacttttttcttcatgcctgattgtgatctgtcaatttcatgtcaggaaagggagtgacatttttacacttaagcgtttgctgagcaaatgtctgggtcttgcacaatgacaatgggtccctgtttttcccagaggctcttttgttctgcagggattgaagacactccagtcccacagtccccagctcccctggggcagggttggcagaatttcgacaacacatttttccaccctgactaggatgtgctcctcatggcagctgggaaccactgtccaataagggcctgggcttacacagctgcttctcattgagttacacccttaataaaataatcccattttatcctttttgtctctctgtcttcctctctctctgcctttcctcttctctctcctcctctctcatctccaggtgcaaatagtctacaaaccagttgacctgagcaaggtgacctccaagtgtggctcattaggcaacatccatcataaaccaggtagccctgtggaaggtgagggttgggacgggagggtgcagggggtggaggagtcctggtgaggctggaactgctccagacttcagaaggggctggaaaggatattttaggtagacctacatcaaggaaagtgttgagtgtgaaacttgcgggagcccaggaggcgtggtggctccagctcgctcctgcccaggccatgctgcccaagacaaggtgaggcgggagtgaagtgaaataaggcaggcacagaaagaaagcacatattctcggccgggcgctgtggctcacgcctgtaattccagcactttgggaggccaaggtgggtggatcatgaggtcaggagattgagaccatcctggctaacacagtgaaaccccgtctctactaaaaatacaaaaaattagccgggcgtggtggtgggcgcctgtagtcccagctactccggaggctgaggcaggaaaatggcgtgaacccggaaggcggagcttgcagtgagcggagtgagcagagatcgcgccactgcactccagcctgggcgacagagcgagactccgtctcaaaaaaaaaaagcacatgttctcgcttctttgtgggatccaggagatagagaatagaaggatggttaccagaggctgggaagggtagtgaggggatggtggggggatggtcaatgggtacaaaaaaaatagaataagacctagtatttgatagtgcaacagggtgactatagtcaataataatttaattgtacatttaaaaataactaaaagatagccgggtgcagtggcttacgtctgtaatcccagtactttgggaggctgaggtgggcgtttgagaccagcctggccaacatggtgaaaccccatctctactaaaaatacaaaaattagccaggcatggtggcgggcgcctgtaatcccagctactcgggaggctgaggcaggagaatcacttgaacctgggaggcagaggttgcagtgagccgagatcttgccactgcactccagcctgggtgacagtgaaactccgtctcaaaaataaaaataaaaatacagctgggcacggtggctcacgcctgtaatcccagcactttgggaggccgaggcgagcggatcacaaggtcaggagatatagaccatcctggctaacacggtgaaacccggtctctactaaaaatacaaaaaattagccaggcgtggtggcaggtgcctatagtcccagctactcacaaggctgaggcaggagaatggcatgaacctgggaggcggagcttgcagtgagccgagattgtgccactgcactccagcctgggcgagagagtgagactccgtctcaaaacaaaaacaaaaacaaaaacaaaaacaaacacacaacaaaaacctaaaagaatataaatggattgtttgtaacacaaaggacaaatgtttgaggggatggataccccattttccatgatgtgattattatacattgtgtgtctgtatcaaaacatctcatgagccccataaatatatacacctaactatgtacccacaaaaattaaaaaaatatattttttaaggtgaagagggaggcgagatgctggccttaacccctaacccgttgttctccctgcaagctgtccacagggcctctcagactcgaggttcagctatatggatgcatgagcttggtccccagccaacatgggagacacttcaccatcggcagcagctacagcacaggaaccctgggtcactgccatgtcccctctgtgactttgtttaaacagaaaatgatgctctgggccggctgtggtggcccacacctataatcccagcaccttgggaggcgggggtgggcagattgcctgaggtcaggagttggagatcagcctggccgacatggcgaaaccccatgtctactaaaaatacaaaaactagccaggcatggtggcacatgcctgtaatcccagctacttgggaggctgaagcaggagaatcacttgaacccaggaggcagaggctgagtgagccaagatcgtgccaatgcactccagcttgggtgagggagtgagactccgtctcaaaaaaaaaaaaaaagaaagaaaaagaaaagaaagtgatcctactggaaccatgcttactcccctccccacctcacactgtgtagaaattagtgctgtcggccaggcgcggtggctcatgcctgtaatcgcagcactttgggaggccaaggcaggcggatcacgaggtcaggagatcaagaccatcctggctaacacagtgaaaccctgtctctactaaaaatacaaaaaattagccgggcatggtggcaggcacctgtagtcccaactacttgggaggctgaggcaggagaatggcatgaacctgggaggcggagcttgcagtgagccaagatcgcgccactgcataccagcctaggtgacagagtgagactcagcaaaaaaagaaagaaagaaagaaagaaatcagtgctgtctatacttctttctgcagtgatggaaatattctgtatctgtgctgtccagtatagtagccactagctacatgtggcacttgaaacatggctggtacagttgaggaagagtggctgccatatcggacgacacagctatagattctgtcaccccaccccgagagtccagagcggggacttctgccttaggccctattcagggctgatttttacttgaacccttactgtgggaagagaaggccatgagaagttcagtctagaatgtgactccttattttctggctcccttggacactttgtgggatttagtctccctgtggaaagtattccacaagtggtgccactaccccagctgtgagagcagctgggagctgcttttgtcatctttccctggaaagtcctgtgggctgtctcttcctcatgccttgtcccatgcttgggcatggtgtcaagcgtcaggagggagaaagggtccttatttatttatttagagagggacccttcttctgttcccaggctggagtgcagtggtgcgatctcggctcactgcaacctccgcctcctgggttcaagtgattctcctgcctcagcctcctgagtagctgagattacaggcacatgccaacatgcccggctaattttttttttttttttttttttttttttttttttttttttgagatggagttgtactctcattgcccaggctggaatgtaatggcacaatctcggctcactgcaacctccacctcctggattcaagcaattctcctgtctcagcttcccaagtagctgggattacaggtgcccgccaccatgctcaactaatttttgtattttttttttagtagagacgaggtttcaccatgttggtcagactggtctcaaactcctgacctcaggtgatccacctgcctcggcctcccaaagtgctaggattacaggcatgagccaccacgcccggcctgaaagggttcttatttagtgtgcattttgacattcaatttaattccaaggtcttgtggggtcatggtttacaggatgttgatatagaaaagacttcacttaatgggccgggcgcagtggctcatgcctgtaatcccagcactttgggaggccgaggcaggcagatcaggaggtcaggagattgagaccatcctggctaacacagtgaaaccccatctctactgaaaatacaaaaaattagctgggcgtggtggcaggcacctgtagtcccagccactcggttggctgaggcaggagaatggcatgaacccgggaggcggagcttgcagtgagcagagaccatgccactgcactccagcctgggcgacagagcaagactctgtctcaagaaaaaaaaaaaaaaacagactttacttactggaagccaaccaatgtatatttagagtaatttttcctgggctgagctgtcatttacttttgcagtatctcaagaagaagagtttacagtgtaaatatttgatgcacactttgattatatagatgaagcaaactattttcaagagctttgcaaggacttacttgtatccaaacaccattctaaaaggagtcttacctacttctaaaggctggtctctacttggaaccacttgcttggccctggttcaagtcctgctgcaaacctggaagtcctgtcattgtcttcttccctccagagcagtggcacccaatctaatttttgctgtgccccagcagcccctggcactttgccctgtagactgcagacctcatgtaatgtatgttaagtccacagaaccacagaagatgatggcaagatgctcttgtgtgtgttgtgttctaggaggtggccaggtggaagtaaaatctgagaagcttgacttcaaggacagagtccagtcgaagattgggtccctggacaatatcacccacgtccctggcggaggaaataaaaaggtaaagggggtagggtgggttggatgctgcccttgggtatatgggcattaatcaagttgagtggacaaaggctggtccagttcccagaggaggaaaacagaggcttctgtgttgactggctggatgtgggccctcagcagcatccagtgggtctccactgcctgtctcaatcacctggagctttagcacgtttcacacctgggccccaacctggagaggctgaccaatgggtctcaggggcagctcggttgctggagtttttgtttttatttatttttatgtatttaaggcagggtctctgtattagtccattctcacactgctaataaagacatacccaagactgggtaatttataaaggaaagaggtttaatggactcacagttccacatggctggggaggcctcaaaatcatggcggaaggcaaaggagaagcaaaggcatttcttacatggcgacaggcaagagagcgtgtgcaggggaactcccatttataaaaccatcagacctcatgagatttattcactatcatgagaacagcatgggaaagacccgcccccatgattcagttacctcccactgggtccctcccatgacacatggaattatgggagctacaattcaagatgagatttgggtggggacacagccaaaccatatcagtctccctctgtcatccaggctggagtgcactggcatgatctcggctcactgcagcctctacctccctgggtcaggtgatcttcccacctcagcctcccaggtagctggaactacaggtacctgccactatgcctggctaaatattttgtatttcctgtggagacgaggttttgccacgttgcccaggctggtcttgaactcctgaggtcaagcaatatgcccacctcggcctcccaaggtgctgggattacaggtgtgagccacagtgctcggcctaagtcactgcagtttttaaagctcccaggtgattcttcagtgcagtcaaaagtgagaactggctgggtgcggtggctcatgcctgtaatcccagcaccttgggaggcgaaggtgggcagatggcttgaggtcaggagttcaagaccagcctggccaacatggtaaaaccccatctctactaaaaatacaaaagttagctgggtgtggtggtgcgtgcctgtaatcccagctacttgggaggctgaggcatgagaattgcttgaacccaggggacagaggttgtagtgagccgagatcgtgccactgcactccagcctgggcaacagagtgagattccatctcacaaaaaaaaaaaaaagcgagaaccactgtcctaggccctgatgtttgcaggcaactaaaaaaggaagtggacatccccagtcagctgtggcgcaccaagaacaagtcatgggaacataacctaattttctaaatgggttactaggcacttagagcaaaacaatgatgccgaaatcctgatttcagcaaagcctctgcctgcctgtcttggaagtatccacatgaggctgctggggccttggtgtccccagcagtttctagtctctaggtcttgctgtgggtgtctgtgcagtgagggtgtgtgtggcgctgggtgagctctgtctaggcctggcacaggatgcggtctggtagctgctgcttctcttctgcagaagcgcagccaagcaccctctggggtttcaggcccacacccagcctgaagttctgggagtggctcactttccaaccttcagggtctcccagcagctgactggggagtggtggagggaaaagggattgtattagtccgttttcacgccgctgatgaagacatacccgatactgggcagtctaaaagatagaggtctgatggactcacagttccacgtgactggggaggcctgacaatcatggtggaaggtgaaaggcttgtctcacacggtggcagacaagagaaaagagcttgtgcaggggaactcccctttataaaaccatcagatctcgggagacttattcactatcatgagaacagcacgggaaagaccctcctctatgattcaattacctcccaccaggtccctcccacaacatgtaggaattgtgggaactacaattcaagatgacatttgggtggggacacagccaaaccatatcagggcgtcccagaaagggtatagggtctgagacccaagtcagcatgagaaagtatgcttctcatggtggcccagttgggtggaagtggcagccgggccgtctttccaccaggccactcaagtagcagctgagagacccctgccctggccagtccccgccctcccctcttgccactgcctctggttctgaacagatgggcaccctcatcttgtatttgtgattaatgtctaacaatgtagttttgtgagaagggtttgctgatacagccttgctgcagatgctgcgaactgtggcctggggcagaccttacctccagacacgccctgaggcaggggagggcactggcccgtagctggccgagagctctcgggttgcgcgacagggatacttttcagcggctgggtcgctatccaaagtgagaaaacgaggagggaccaggaggctgtccgcctcaagagatgtgggggccaggtccagttatctggggaagcagtaagcttctctgctgtttctaaccccaggcctcccctggtctaaggcagggcctcccagcctcggggcactttaaagatatctgggcctggccccatccccacagtctgactgagtgggtctggatagggcctgagcattggtgatttcctgggtgaaaggaggcccctcacagtctctggaagcttctctgtgttaggaaaagctctgggcttgactctgctttgaaagtcaagatccgcaaatcctctcagcctcagtttctccttcagcaagatgaaatggaaatgctgtacctacgtcccggggtggttgtgagacccaaaaaagacaatgttctggaaggttcctggtgcgttgcagtcctctaagaacctgagttagagccacgctgagtctcagcttcttggctccttctgtttcaaactcgtccatgtgatagctcaggaagggtaggcagggccctgccccctactcagaaaacaccatcctggtcctggggatccccgcagcattagtcccctgttttcccagtgtattgagaaaaattgctaacaagcagtggggcacaccaccagcctcctgggttcctttcagtttggggatttttggacattcccaggaatgtcttaaaaaacacttcaaaaaacattaacataaatatttttatcaaagcctgtattaaatggtctttcaagaaaatacagtaacaggtcaggcatggtggctcatgcctgtaaccccagcactttgggaggccaaggcaggcagatcacctgaaatcaggagttcaagaccaacctggccaacacagccaaatcccatctctacaaaaaatacaaaaattagctgggtgtggtggcacacacctgtagtcccagctacttgggaggccgaggcaggagaattgcttgatcccggaggcggaggttgcagtgagccgagatcgtgccactgcactccagcgtgggtgacaaggtgaatctttgtctcaaaaaaaaaaaaaaaaaaaagataaaatacagtatacagtaatagagaacaatccttttttcaaagtagtgaccccaaatgaacaaaatatgcatctagcttaaatgcgaacctggttttctctacgcccattcaagcccctgcaataggggcccttcaccccgcatccatggactcctaaaattatatggaaaatggctgtgtgtgagtgtggatggacatgtgcacacatatttttggctttaccagatgctcaaagagcctaggacccaaaaagggctgagaatgaccgtgtcggccacttcagggtcatcaggaattgctgtgcactgctcacttctccagtgaacactttctgcttctgtgtttcctggtatcctttgggactcctggctaggtcatgtgtttctctactttcaaaagggcttcagccaggcacgatggcatgagcctgtagtcccagttgctctggaggttaaggtgggaagattgcttgagcccaggaatttgaggccagcctgggcaagtagataggtagatgattgatagatagatagatagataaatagatggatagataagtcgctagacagtcatccatccacccatccacacataaaaaggcctttgtcatgtcatgttttgtggcccacctgccagtgttgcccacagttgctgcccctccaaactcatcagtcactggcaaacaggaggaatgtgtggctcatgtctgggcatcagtggctgtgggagacatccttgatcttctccagcttctccttccacattttcctttgcaatctggcaatatctattaaaataaaatgtgcatgccttttgacctaagagcttcacttctaggacccacttacacgtgtgtgacatgatgttcatacgggtttatttatctgaggttgttcatacacaccattgcctgtaatcactaaaggcgggagcagcctacacatccatccacagaggagtagatgccttttggtacatccgtggcgacggaatactaagcagcctgtgtatctatacactcacacgtgtttgtttatgtgtggaatatctctggagggtacacaagaaacttaaaatgatcactgtctctggggagggtacctgggtgcctgggaggcaggtcagggaaggagtgggcacaggtattaccaattggaagacaataaaaacaacagctcctggccaggcgcagtggctcacgcctgtaatggcagcactctgagaggctgaggcgggcagattgcttgcgtccaggagttcaagaccagcctgggcaacatagcaaaaccccgtttctattaaaaatacaaaaaattagccaggtgtggtggcatgcacctgtaatcccagctactcgggaggctgaggtgggagaatcacctgagcctgggaggtcaaggctgcagtgaggtgagattgtgccaccgcactctagcctgggcgatagagcaagaccctgtctcaaaaacaaacaaaaaacagtccctggcactctgggccaggcctggcagggcagttggcagggctggtctttctctggcacttcatctcaccctccctcccttcctcttcttgcagattgaaacccacaagctgaccttccgcgagaacgccaaagccaagacagaccacggggcggagatcgtgtacaagtcgccagtggtgtctggggacacgtctccacggcatctcagcaatgtctcctccaccggcagcatcgacatggtagactcgccccagctcgccacgctagctgacgaggtgtctgcctccctggccaagcagggtttgtgatcaggcccctggggcggtcaataattgtggagaggagagaatgagagagtgtggaaaaaaaaagaataatgacccggcccccgccctctgcccccagctgctcctcgcagttcggttaattggttaatcacttaacctgcttttgtcactcggctttggctcgggacttcaaaatcagtgatgggagtaagagcaaatttcatctttccaaattgatgggtgggctagtaataaaatatttaaaaaaaaacattcaaaaacatggccacatccaacatttcctcaggcaattccttttgattcttttttcttccccctccatgtagaagagggagaaggagaggctctgaaagctgcttctgggggatttcaagggactgggggtgccaaccacctctggccctgttgtgggggtgtcacagaggcagtggcagcaacaaaggatttgaaacttggtgtgttcgtggagccacaggcagacgatgtcaaccttgtgtgagtgtgacgggggttggggtggggcgggaggccacgggggaggccgaggcaggggctgggcagaggggagaggaagcacaagaagtgggagtgggagaggaagccacgtgctggagagtagacatccccctccttgccgctgggagagccaaggcctatgccacctgcagcgtctgagcggccgcctgtccttggtggccgggggtgggggcctgctgtgggtcagtgtgccaccctctgcagggcagcctgtgggagaagggacagcgggtaaaaagagaaggcaagctggcaggagggtggcacttcgtggatgacctccttagaaaagactgaccttgatgtcttgagagcgctggcctcttcctccctccctgcagggtagggggcctgagttgaggggcttccctctgctccacagaaaccctgttttattgagttctgaaggttggaactgctgccatgattttggccactttgcagacctgggactttagggctaaccagttctctttgtaaggacttgtgcctcttgggagacgtccacccgtttccaagcctgggccactggcatctctggagtgtgtgggggtctgggaggcaggtcccgagccccctgtccttcccacggccactgcagtcacccctgtctgcgccgctgtgctgttgtctgccgtgagagcccaatcactgcctatacccctcatcacacgtcacaatgtcccgaattcccagcctcaccaccccttctcagtaatgaccctggttggttgcaggaggtacctactccatactgagggtgaaattaagggaaggcaaagtccaggcacaagagtgggaccccagcctctcactctcagttccactcatccaactgggaccctcaccacgaatctcatgatctgattcggttccctgtctcctcctcccgtcacagatgtgagccagggcactgctcagctgtgaccctaggtgtttctgccttgttgacatggagagagccctttcccctgagaaggcctggccccttcctgtgctgagcccacagcagcaggctgggtgtcttggttgtcagtggtggcaccaggatggaagggcaaggcacccagggcaggcccacagtcccgctgtcccccacttgcaccctagcttgtagctgccaacctcccagacagcccagcccgctgctcagctccacatgcatagtatcagccctccacacccgacaaaggggaacacacccccttggaaatggttcttttcccccagtcccagctggaagccatgctgtctgttctgctggagcagctgaacatatacatagatgttgccctgccctccccatctgcaccctgttgagttgtagttggatttgtctgtttatgcttggattcaccagagtgactatgatagtgaaaagaaaaaaaaaaaaaaaaaaggacgcatgtatcttgaaatgcttgtaaagaggtttctaacccaccctcacgaggtgtctctcacccccacactgggactcgtgtggcctgtgtggtgccaccctgctggggcctcccaagttttgaaaggctttcctcagcacctgggacccaacagagaccagcttctagcagctaaggaggccgttcagctgtgacgaaggcctgaagcacaggattaggactgaagcgatgatgtccccttccctacttccccttggggctccctgtgtcagggcacagactaggtcttgtggctggtctggcttgcggcgcgaggatggttctctctggtcatagcccgaagtctcatggcagtcccaaaggaggcttacaactcctgcatcacaagaaaaaggaagccactgccagctggggggatctgcagctcccagaagctccgtgagcctcagccacccctcagactgggttcctctccaagctcgccctctggaggggcagcgcagcctcccaccaagggccctgcgaccacagcagggattgggatgaattgcctgtcctggatctgctctagaggcccaagctgcctgcctgaggaaggatgacttgacaagtcaggagacactgttcccaaagccttgaccagagcacctcagcccgctgaccttgcacaaactccatctgctgccatgagaaaagggaagccgcctttgcaaaacattgctgcctaaagaaactcagcagcctcaggcccaattctgccacttctggtttgggtacagttaaaggcaaccctgagggacttggcagtagaaatccagggcctcccctggggctggcagcttcgtgtgcagctagagctttacctgaaaggaagtctctgggcccagaactctccaccaagagcctccctgccgttcgctgagtcccagcaattctcctaagttgaagggatctgagaaggagaaggaaatgtggggtagatttggtggtggttagagatatgcccccctcattactgccaacagtttcggctgcatttcttcacgcacctcggttcctcttcctgaagttcttgtgccctgctcttcagcaccatgggccttcttatacggaaggctctgggatctcccccttgtgggggcaggctcttggggccagcctaagatcatggtttagggtgatcagtgctggcagataaattgaaaaggcacgctggcttgtgatcttaaatgaggacaatccccccagggctgggcactcctcccctcccctcacttctcccacctgcagagccagtgtccttgggtgggctagataggatatactgtatgccggctccttcaagctgctgactcactttatcaatagttccatttaaattgacttcagtggtgagactgtatcctgtttgctattgcttgttgtgctatggggggaggggggaggaatgtgtaagatagttaacatgggcaaagggagatcttggggtgcagcacttaaactgcctcgtaacccttttcatgatttcaaccacatttgctagagggagggagcagccacggagttagaggcccttggggtttctcttttccactgacaggctttcccaggcagctggctagttcattccctccccagccaggtgcaggcgtaggaatatggacatctggttgctttggcctgctgccctctttcaggggtcctaagcccacaatcatgcctccctaagaccttggcatccttccctctaagccgttggcacctctgtgccacctctcacactggctccagacacacagcctgtgcttttggagctgagatcactcgcttcaccctcctcatctttgttctccaagtaaagccacgaggtcggggcgagggcagaggtgatcacctgcgtgtcccatctacagacctgcggcttcataaaacttctgatttctcttcagctttgaaaagggttaccctgggcactggcctagagcctcacctcctaatagacttagccccatgagtttgccatgttgagcaggactatttctggcacttgcaagtcccatgatttcttcggtaattctgagggtggggggagggacatgaaatcatcttagcttagctttctgtctgtgaatgtctatatagtgtattgtgtgttttaacaaatgatttacactgactgttgctgtaaaagtgaatttggaaataaagttattactctgattaaataaggtctccattcatggattccaaggacaagaaagtcatatagaatgtctattttttaagttctttcccacgcacccttagataatttagctcagaacaggaaatgatagtattaataaaagctggacatcaggattaacagctctctctggggccctgaaggtgagagttctcagacttgctcatttgcagttgcttctttgtgatgctggcaaaccatcctagtcccattcaaagggcaatacaaagccttgtggctgacctcacgatgcagcactcagtttgcaagaccggcaccagtgtatgcaaacctgagaaggttggggatgaggatatgggatctttcatccctggaaatttagtccagaggcctggggctggagcagaacaccaagccaatcagcttaatgaatggcttagattcctgctaggtttgcagagctgccttctttcctttggtaccttattatagattgaggagtatttctgctaaaccaagatagggataaccagatagcatcttcatagcaatgccacaaaggaaaacaaaaacaaaacagtaatccatcatattattccttagtaactatgccaaggtcatgatactgaatccttagattgtttcaaaatactacttttctttgctcttcctgatgtgtttgccaccgcaggcagatgtttaagtaaaacagattttaactgcagctacaaaagcagcaacaggccagcaaaagagaagtgctatctcagagagcatggctttcagagccacaagagacagcctcactggctgtttcagcttgactgccatgcaaagaagagagcagagggagaaccagccccacccacttattcatcttgtacaaaaaaaaagcacctaccagcctaggctacatagtgagacactatctccacaaaaaacccacgaaaactagctgggtatggtggcacatgcctacagtcccagctactggtaaggctgtggtgggaggatctcttgaggccaggaaggagatccaggctgcagtgagccaagattgcaccactgcactccagtctggacaatcgagcaagatcccatctcaaacaataaaaaaaaaaagcgtgtaacctcctcagaagaaagatgttataatctcaggcagcaggcaagaaccaatccaggctctaagcaaattatgtatctcactgaccccaccaaacctcagaaaaatttaacagtgagaagcaaaatctcctttaaagagcaacttagaacagatagaaaatatcatacagctgacttcactagagagaaagtgcatcaactgctttcactcaacaaaaagaaaaaagagatgatcaatgcagatcccctctcctcctggcagcccttaccctcagtgaaaagccaccaccattctctctctggtggccatcagatcaacctgcggcgttcccacaagacagaatggagattttccaaggtatagagcaagtcagagtaccccaaagaacggcggcagagagccagctccgaaactgccaacactaccatgcatacacagttcagtaagtcaagaaaggcctggtacacagcattctgtaacttttttttttatttttttcaatttttccttcttttttttttttaagcactagtctgtgctttgcgaacagaatcaagacattaacaaagatcagcttctctgaagaaaagcatttctatagaacaaagacagctacatgtttcgctgccattacacagctccaaagcaggaaaagaaaatatttacaaaatacaaggttttttttttccattttttgtttttgttttttttttcaatgctaaaagggttattcagaattttcaaccttataaatagaagaagcactttatgcatagggatatggtgcattattgtatttttttttaaagaaacaatgacaaaccctttaacttgcaaacagaaaaaaaaatcactaatgttgaaaattgtgaaaaaaccccaaccattaa

SEQ ID NO: 772 - DNA, 25057 bp, Homo sapiens
cacaggccatttgtcactcatatttggctcagaataaacctcttcaaatattttacagagtttgattcttttcattgacagaagatacaaggatgcctacggaatggaatgtagaccaaaaaaaaataataatagtaatgtggccgctccatcaagtcccccactccattctcctctaattctgtggctgggcatatcaaagcctacctggtaaagagttgatgttctgtgaatgaatgagactttcatacagaatattaaatctgcaatataaacagatattcatcagaaaaccatatactatcatgtactccataaatatatacacatactatgtattcataaaaattttttaaaaaccaaccaaacatggccaggcatggtggctcatgcctgtaatcccagcactttgggaggctgaggtgggcagatcacccgaggttgggagttcaagaccaacctgaccaacatggagaaaccccatctctactaaaaatacaaaaattagccaggtgtggtggcacatgcctgtaatcccccctactcaggaggctaaggcagaagaattacttgaacccaggagggggaggttgcggtgagccaagatcacgccattgcactccagcctgggcaacaagagcgaaactccatctcaaaaaaaacaaaaacaaaaaaaaccaaccaaacaaaaactatttatcattgtattagtctgttttcatgctgctgataaagacatacctgagactggtaagaaaaagaggtttaattggacttacagttccacatggctggggaggcctcagaatcatggcgggaggcaaaaggcacttcttacatggtggcggcaagagaaaatgaggaagatacaaaagtggaaacccctgataaaactatcagatctcataagacttattcactaccacaagaatattatgggggaaaccacccccatgattaaaattatctcccactgggtccctcccacaacatgtgggaattatgggagtacaattcaagatgagatttgggtggggacacagagccaaaacatatcaatcatatatccaatttcacctttttgggataccattaaagagatgagaggccaggggcagtggctcattcctgtaaccccagagatgtggtgggagtatcacttaatgccaggagttcgagaccagcctgggcaaatagcaagaccccatctctacaaaatattttttaaattagctggacatagtggtgtgagctgtagtcccaactatttgggaagctgagggaggaaggttgcttgagcccaggaattcaagactgcaatgacccatgatcataccactgcactctagcctgggtgacagaacaagaccctgtctcataaataaataaataaataaataaataaaaagatgggagatgttatgggagaatctcaagatgattccttgagacctgagacccatggcaccaccataaaaagaatttttccttctcaggaggatagacagggatgaatggagtcaggaccattgtccctgggaaatgcatgcctgtgcccctggcacagtaaggctgtatctctgacctgagaggtgagaatgcagaacccctgaaatccttgctggaaacctctctcttccaaaatccacttacttgtccattccatacagatgtctgccaaagaatcaagcttcatgctgtgcttgattcagacctgtcagacttcagatttttctacagatggagaagtgagtaagtccagcctacaatggaaggttaattaacatcagtctggagatttcatttccagctgatggattacgtatcgcaggtccagtgagttcatttgcagctcaggggaacaaatgcaaaggcttaagacaaacgtactctttaactcaagacaaccaatacaatgtcttataagctgtgtggtcatcataagcctcatactaaaaggttatgttcctgggagattaaagaaaatctttgtagttgaaacattaaatatctcagagaacctctttttccttctctataaacattaaagagaggagctataatggtaatgttgaccaaaaaaaaaaaaagccaaattctgtaaattatttaaagaggtttattctgagccagtatgagtgatcatggctcagagtacagtctcaggaggtcctgagaaaggatgcccaaggtggctgggttacagcttggttttatacattttagggagacagaagtgacaggcaaaaatataaatcaatacatggaaggcatatacattggttcagcctggaaaggtggaacatcttgaagcagtggatgctcataggttctacgtggagtcaaagattttctgactggcaattggttgaaagagttaagctttgtctgaagaattgaactcagtagaaagaaacgcttgagttaagataaggggggttgcagaagccaaggttttgtgctgactcagcacacgaggacggtgtcaactccctatgacttcatctctgacccaaccaatcagcactccccactttctgaccccctactcaccaaattatccataaaaaccaccatccttgagttttcagggagattgatttgagtaataataaaactctggtttcccatacaggtggctctgtatgaattaaacccattctctattgcaattcccctgtcttgataaatcagctctgtctaggcaatgaacaaggggaacccaatggacagctatgataccagcgtcaggctggaatttggtatcttattgtcagtcttatgtgcactattgaatattaatgctggtcagtcgtggctaaactccaaaagggagggggtataaggaggcgtgtccaacctcccttcctttcatggcctgaaatttagttttttaggttttctttggcccagagggggtccatttagtcagttggggagcttagaacctcatttttagtttacagtaatgagacacagcagatgagtagattgattttattttaagacagagtctcactctgtcacccaggctggagtggagagtggagtggcacaatcacagcccactgcagccccaaccccctggactcaagcaatcctcctgcctcagactcccaagtagctgggacctcaggcacttgccaccatgcctcgctggggtcttttaaattattattatctgtagtgacagggtctccctatgttgcccaggctggtcttgaactcctggcctcaagcgatcctcccacctcagcctccccacgtgctggagtgaaccactgcaaacctggcttcagacgagtggatttaaactttaaatccactcatctgtgccccaactaagtttccatgagtgagcctgtggttactggaatgtgagatttctccaactttctttcccttatcattcttcaaattacaacttcagtggagcatttaaaattataattaaaaattccctgaggttgatccaaaaaattaaatatctgatattcatgtgcctctatacaaatgggaaattcatctatgcctctcccaaataaatatgattggatatcacaagaaccataaaattcctcccttaaggaagattatgagagagaccagcacacacacacacagtgcaagctaaagcaaccccgtcttggatgctaatccaccaagttgatgtgttttgttggttttttggttttgttttgagacagagtctcactctgtcgcccaggatagagtgcagtggtgtgatctttgctcactacaacttccacctcctgggttcaagcgattctcctgccttagccacctgagtagctgggattacaggcgtgtgccaccacgcccagctagtttttgtatttttagtagagatggtgttttgttggccaggctggtcatgaacttccggactcaagtgatccacctgcctcagtctcccaaaatgctgggattacaggctgtgagctaccacacccggccaaccaagttgacttctgattaaccagcttttagggaaggcctctaagatttccagtttatctattgttccttgtgtaaaagtatgtacttaccataaatcctgcccttaggcagattcacacagcattcttgcctttccctgggggactgacttcaaatgtccgtcacattcctttcctatagcatataggccctgggtcttgggggtaatggcatggggatccaccatcttgtctccctgccgctgaagccagagactatggcttctgttcataaatccctttctccttaaatatgaagtcaaaggtcatgtagataggagctgctgctgaagaagggattttttgtctgaagagttctgtcccctgggcttacttggctatggggtggacccctggccaggagacagcaaactgtttcagtaatgtgcgtgtcgtgcgtgtgtgtgttctgtggtgagcaggcctatgccattaaacaaacggtgtggctttgggcaagctgctatcttgggacctcagcacactcattcataaattgtgtcttttgggtgagatttgtcttggggtcttcaaaacccctgagactgtggacacatacagcagcctaacggcattgaggagggcaagcattcaacagttaggacaatgtgaactgtagctcagctctgctaggtaccttcacaagacctcgaatgctgccccttactatgcctcggttttcttatctataaaaacggcatttttatcttgttggtggagctgttaaataaattaaaagacgtaaagggtctggcaccatggttggcaaaaaatatcagtttcccttctcgacttctcgattttgcccaggaccagtgatgttcacattcaggacctgcctgaaccggcaagccctccacgtgggtccaaagtgcaaagggaaagtcactgctagaggcgccagtaccagcatagcgcccccacgcgccgagtcggggaactgccgcgggggccggccccgcccaccagcgcctgcgcctgcgcagaggcaccgccccaagtttgttgtgaccggcgggggacgccggtggtggcggcagcggcggctgcgggggcaccgggccgcggcgccaccatggcggtgcgacaggcgctgggccgcggcctgcagctgggtcgagcgctgctgctgcgcttcacgggcaagcccggccgggcctacggcttggggcggccgggcccggcggcgggctgtgtccgcggggagcgtccaggctgggccgcaggaccgggcgcggagcctcgcagggtcgggctcgggctccctaaccgtctccgcttcttccgccagtcggtggccgggctggcggcgcggttgcagcggcagttcgtggtgcgggcctggggctgcgcgggcccttgcggccgggcagtctttctggccttcgggctagggctgggcctcatcgaggaaaaacaggcggagagccggcgggcggtctcggcctgtcaggagatccaggtgagcggggccgggtcctaagccgagcggaggacggagctaagcgcgggggcgggtcctcagctgggtgggggcggggctaggtgtggaggcggggctctgagcagatcgagggccgaggcgagggtccttaaagctcatctatttcaccattactgatcggctgctataaataaagccagcacctcccatttgttttaatgtttcccttcctcaaatgaagacatgttgccgattacagctcctgtcgcagcacagcaaaaggctttgtgtaaattttctaaaatgtacggacaactaaatcataacattcctatccctttgaggtagttgccgtccctaatttatggagaaggaaagtcctcaggtgaagggacttgctcgaagtcacacagctaataaaatgcagtgcccttaaccactgagccaggctgcctccgccgtttaaccaaaggattagtagtgacagagctgaaaccgcagtaaaaactatgaacggcgagaaaaacagtcctaacattttagttacctgtgtagagttatccctgctgactggatacacaagggttcttagggttttttaatgcttaaaatagcacaagacttctctttttgcccaaccaaagtctgtattagggttctccaaatggaatcaataggatgtgtctatatagaggcaggtttattttgaggacctggctccctatggggattggcaaagtcttaaaagccgcagagtaggcgggcaggctggagagccagggaggagccagcggtgcagttcaggtttgaagcctggccgctggcagaattccatcttcttccagggaggtcactcttcttcctgggggtgtagaaccactcactaaattagcatagcccctgcattttacaggttagggctgaggtggtggaagagggagtgacttgcccaaggacacagctgttagggccaagcagtggctcctgggtttcctggtttccatcccagttcttattgctcatcaccactgtctcatgtttgagctctggccagtttggggtgacaggtgacatctggcctagtccccagcccctgaccttgtcttttgccacagcttaactggcagaagctaaggatgggaaatttgactaatcctgcttaaaactaaagaggcttttttaactgaggagattgatcctcctaaacttaccattcacacacaccttcttcgcacacttcaccctcctatgcctgaaaatgttattagttatcaattaatttcacattaaaaaaattttttttggtcaggcactgtggctcatgcctgtaatcccagcactttgggaggctgaggcgggcggatcacgaggtcaggagtttgagaccagcctggccaacatggtggaaccctgtctctactaaaaatacaaaaattacccgggcgcagtggtgggcgcctgtaatcccagctacttgggagactgaggcaggagaattccttgaacccgggaggcggaggttgcagtgagctgagatcacgccactgcactccagcctgggtgacagagcaagactctgactggggggagaaaaagttgttttcactggctacttttgctggaattaatttcacatttaaaaaattctgggccgggcggggtggctcatgcctgtaatctcagcactttgggaggccaaggcgggcggatcatgaggtcaggagatcgagaccatcctggctaacatggtgaaaccccgcctctactaaaaatacaaaaaaattagccaggcatggtggcaggcgcctgtagtcccagctactcgggaggctgaggcaggagaatggcgtgaacccgggaggcagggcttgcagtgagccaagatcgcgccactgcactccagcctagaggacagagtgagactccgtctcaaaaaaaataaaaaataaaaaaataaaaaattctgaagccaggcatggtgactcatgcctataatcctggtgctttgggaggccaaggtgagagaatctcttgagcccaggagttgaagaccagctgggacaacatagtgagaccttgttcccacaaaatattaaaaagttagctaggcatggtggcacatgccgatagtcccagctacttaggaggctgaggtgggtggattgcttgagcccaggagtttgaggctgcagtgagctgtagttgcaacactgcaccccatcctgggcaactagcaggagtgtgctagtagcaagctctaaaaatttatattataaaaatatatatataatgtgtatatatatgtatatgtgtatatatgttgtgtatactataatatgtatgttccatataatagtatatagtatattttatatatatacacacacacgttgcttctgctccatgaagtttataagggaagttggattttccttttttttttttgatacggagtctcacaccgtcgcccaggctgtgcaatggcacgatctcagctcactgcaacctccacctcccagattcacgcaattcttctgcctcagcctcctgagtagctgggattacatgtgcacaccaccacacccggctaattttttgtattttttagtagagacggggtttcactatgttggccaggctggtcttgaactcctgacttcatgatccgcctccctcggcctcccaaagtgctgggattacaggcatgagccaccacgcccggcctggactttcatttttttaaaaggttcaaagttatagtgcaaggttaagttgcttacagatagcaggtgctttaggaaccctctagaaggaaagttgccatgggctgggtcatcagggctggtcacagaggaaggaggagcttgagttgggcttgatggctgagcagggatgagccagacagagcaatactatagaaacaggggctggaaggatgctgtgagcagctttcagagggaggcgtccaaaggatgagtgcaggcagcgtgcagaccagcctggcagcagccagaacacagataacctcctgggcagtctgatggacagccgagtgacacatgaaagcaacatattttgatgtggctcagagcagggaaggcacggcactgagagtggggtagtctagagatggtgcctggtaggctatggccaaggggcatatgcagagctgtgcctggcacccaggggtgactaaccttggaaaggaagagctcagcagatcagaccatttgagagggaaagcggagcctgggtgactggaagagtgacgtcaccgctgcctgaagcaggggaagacccaccagatttttgtcacatggcctctttcccagtgcagcactgcccccagcacctgcacctccatctatttctgtctgaactcttgtactcttgctacctttctggacagagtagcctcatcggggccctaagaggcagagagagaaagacagtactgaatccctctgctctggggatgcgcctgatgtcacccacttgcctgagagaccctctgagatcactgtggatcacacactcctgctagttgcccaggagccgtcagccaaggtctttgcagagcgagctgtctccataatcagacacctccagaactctgctggagagtgaaggcagcaaggagaggtgcactggctgcgggacgtggggtttctgacctctcagatcattgagtattgtgatcccagtgaagcaacagagtttgagaaaaatcattctgaataatgagaaagaagatggcctggacccaggctgagcagtagaacctggttgggttgtgtttttctggtttattgatctggtcgacgtggaccacgccttgctgcacctctctctgcctcccctgtttcccttttcttgggccttcctaggctccctggctcacggtgcattcttttctcatcacaggcaatttttacccagaaaagcaagccggggcctgacccgttggacacgagacgcttgcagggctttcggctggaggagtatctgatagggcagtccattggtaagggctgcagtgctgctgtgtatgaagccaccatgcctacattgccccagaacctggaggtgacaaagagcaccgggttgcttccagggagaggcccaggtaccagtgcaccaggagaagggcaggagcgagctccgggggcccctgccttccccttggccatcaagatgatgtggaacatctcggtaagcaccaggcctttcatctttaaaggagatgttctcaaaatgcccatcttagtgggcctggtgaggattttttccaggaagtaggtaggaaaagacagattatccacaggaaaggtgcctgtatagtcaggttacctccccctgttacacagaagtctaaaccagaatgtttgaaattgtattctgcccacagatcacccagagatcaggttcaaaggtagattttggccaggcctggtggaccatgcctgtaatcccagcactttgggaggccaatcacttgagctcaggagtttgagaccagcctgggcaacatgatgaaaccccatctctatgaaaaatacaaaaattagccgggtgtgacagcttgcacctgtatgtagtcttagctacttgggtggctggtggctgaagtgggaggatcacttgagtgcaagaggcagaggctgcagtgatccaagattgtggcactgcactccagcctgggtaacagagtaagaccctgtctcaaaacaaaacaaacaaacaaaaaaaacccaaaggtagattctgattcagcaggtcagggatggggcctaagattgtgccttcccaataagctcccacgtgataccaatgccactgctctgtcaaccacactttgagtaacaagtgcctaaaccactgatttctaccttgattggttagttcaccatcccctccttcctgcaacctgcctcactggagagggggaactggatctctttcctttaagctcactctgcaagcccacctccagctcagaggcttgcatgtcaactccctactctcaactcttggaaggactcaagactttgggaaattgaagagtatttttcccccacgaaaacaatttctgtccacttaatttatttaccttgccattgctaggtaggttttaaaaatgtattaagacccgatgctctgtctcctgcccatccctgggcccatccattcaaggccgcagtgggaagtggccacagccgttcatggtgggccctagaggatgcagtttcttgttctgatttggggaatgaaggttattagactgttgcactccaagctgggttaatagctaacaagtagccaaatcctttgcctgtgaaacatccagtcttagcatcaaaacatgccctggttggggcatgacagctgttgcattcacagcagctacaagattgttgattcttaccagatcttcttgatacaggtttcatatgtcctgagagcccttcccaatacaatgaggacaataaggtgctttccccactctttggtttttgtctgtttgtcgtgggggatggaggaaggctgttctgtgattcagtacaacttcacccagggtggagcatgtcaggctctggcctggctgctgaagggagcctgcagaatgagttagtgatccagtggtcaattttgaactggtggggaccagaggcaccgatggcaggaagcagcaccccatatcctgatcaccttggcatctcctccagccctggcatctaggctgcaagagtttgaggagtgtgaagaatcctctgagttggcatggatggtacctctgtctgcctcccaggagtaactagtctcagcctgccagttaagacaggtcatcttatctcgaaggtcagagccaattctaggcagtagctgccctgctccaggttacaggcagggcttacaaggaacttaccattctgctccggcctgtgtaaccctgggttccttgtgggtgttccaggcaggttcctccagcgaagccatcttgaacacaatgagccaggagctggtcccagcgagccgagtggccttggctggggagtatggagcagtcacttacaggtaagtgccctctgcctgccagactgactgggacttctttgagagcaacttcatccatcacttatgtcctcagcacctggtacagtgtctgatatgacagtagataataaaggcttaatgttggtgatggattttcagttagtggataatttcacttgggaaagattgcaggtaatctgaccccaaatgatgatgcacttgcgtaattcacattggagcaggggagaggaggccccccaaaaatgcccagttcacagtgttgcatgattgactggggttctcagattcctcctaagaaatgcacgggtagagcgccacctatcggaataaactgaactctgtccccaccagagggaacactcatttcactaatagttatgtgcactgatggtgccaagagattttaaaaaaaacaaaaagtggtctgttggcccagaggtctcagtgtggcagcagagagcccagggtgtaagtgctagaatcgagtatgcttgggctgagggagcccaggggaggcgtgtgctgcagaggaggggctgctcagaaagccttctcaaagggacagtttgtgccaccttgtgaaggatgaattggcattacttgggcagaggagtagggaagtggcattcccagcagagggaagagcaagtgaacagcagctacgctttcagctcagaaaagcccatgtccaccaccagcctcaccacaggtggtgaggactgacgcgcaggctatgacagaggagatacttgtgcccacctcaatatttacagcctggctcatgcctgtaatcccagcactttgggaggctgaggtaggcagatcacttgagcccaggagttcaagagcagcctgggcaacatggtgaaaccccgcctttacaaaaaataaattttagccgggcatgggggcaaatgcctgtgatcccagctactcaggaggctgaggcgggaggatcatttgagtccagggaggttgaggctgcagtgagccaagatcatgccactgcactccagcctgggcgaccctggagtgagaccctgtctctcatttgtagacccaccaagaagaggtgggtctgctgcatttttggtgatttactggagggctggtttatagatcttcattctgtcagaagcagggaggcaaaagtatgaaattaagggagtggttgtggaaaaccccttccatggtttggaggtttccaatgtgactgggagtccctgcaggccggtggaggtagctgctcaagtggctgctgcttctcctgaggcctttttggagaaagtggacacctgaatgtcagctgctttggggctaacatgatccttgatgcctccttttgtggcatgagtggcagccggccgacgtggtgctgtcctgctgccggagcaccatgatgtctgctgctgagacctcccatctgacatagtccctgtccctcttcagggactttgttcctttagcagttctcactgtctggcctcaaataacacgtctttttctgttggttcctttttgctccagctgtactgtaaacactctttgtttactgcataccctcagtaaatacctgttgaatgaccggatagatgtggcagcaggtacattacctcaacttctggtacaccttgggagaagctttcccaagaacaccctgggttcatttcctcctagcctctgctctcctggggcccagagattgaaggcgcttaacctgctcatctcaccacgtctcccgccttatctctcacccttctcatcagcaccctacactccaccacgctggcttcatagctccttccccgaatgtgccaggcttctctgtgaccatctcttgagcgtacagctggctatacctgggctgccctcctcccacatttcaggtctcagttcagacacccgcaaccccaccatgtatctccccagtacagccatactcctctgcccctgagctcccatgacacctgctggggccctgacagcctggggctgtgatcatgacttgcccaggggcccgagggtggaaacgatgctctggctcctttgattgcatagaacaggggccactcaggttgactcaagagcaggagcagcgcgtgggcacacgtggactgcagccacacagcctggggaccatgcagtgctgggagaggccggtgccctgctctctccccagcaccgtctaggctctgccccattcgcttccctccaccattgttatgcagcaaagggggctctagcctgatgtgctagaagcagtcacactggatttttgagaaaagccaagctttctattgtgagtcgactcatatggagacaggagttgaattcaaccctgtctccctgtgctagctttaaggcggtaattttattagaggaggtttaaggggtggattctaagattagcaggtgattgatggaaggaaaggagaagtctggacagtccttggacatgcacagttatctgttcatgccaactcatgggtcccctgtgcagatttgggaggagtgagtatgaaacgtgcagtggcaattcaggctttgacatcagcaaacttgttctgtgcaagctgcaattggccttattggttccaaccaatttcagccagttcttttatctcataagcagagggagtttcagcctttcagaaagtggtttctgcaaactcaaattttcttttatttttctgagacagggtcttactctgttgcccaggctggagagcagtggcgtgatcttggctcactgcagcctcaacctccctgggctcaagtgatcctcccacctcagcctcccaagtagctgggtctgcaggcacatgccaccatgcccagctaatttttgtagtttttgtagagacagagtttctccatgttgcccgggctggcctcgaactcctgggctcaagcaattgcctgcctcagcctcccaaattgctgggattacaggagtgagccacgggaatttccatcagttactgattcttgaacttgtaggaacgtggttccactgtccacatgctgttctttcctcgcatctcctgttcctgcttccctttggcctgctcacctctggctcctcatggccccagtgaagtatcgtggcttcctctccactgcagactggcagatttcttcactcacactcccaaaaagagaatctacttccctcccttcccttcgtccaaccatctgggtctcgagtgtcactgtaggttcactgccgttggggcaggtgactccttgggccagtcagctttggctgaagggcagggctggcacacagctggcagagccaccccatccaaaatccagccactgtgcctcagcagggctgtggtttgggggtcggggggcgctccccacaggataaggagcagccagggcaggcagatgacactaccactactagctgcatctggatctattcacttattcaacaaaggtttattacacccatattctatgccaactactgtactagacttggaataatggagaaaattcaggcacagtccttgctcttagggagctcacatgattactcattgatgaatatctctctcccctgatagactgcaaatccatgaggacagggactctgtcttgttctgtgccatagttccacagcattccagcatgatgtctggtactcagcatgcaaacagtgcgtattggttgaatgaataatagtacagctaatagcagctgagagcttcctctgtgctagacacgattctaggtgccttccacactttgacaaccttatgcagcgtgttaacactgcattccccttgcaccctggagattgagcccagagaagataaggacagaggggacacattccaagatagatcccccagtggatgcctgaagccacagatagtaacaaaccctatatatactgtgttttttcctatacacacatacctatggtaaagtttaatttataaattaggcacagtaaaaaattaaagataactaataaaatagaataattatgacaatatactgtaataaaagttatgtgaatgtggtctctctctctctcctctctctaaatatcttcttgtactcacctattctcaaactgtagataactgaaattgcagaaagcaaaactgtggataaggttggggctactgcaactcagccaaggacttacagtggcagacctggaatgcaaacccaggcagtctgataccagggtttctccacctgtgttctgccacatgggatggataggatggatgggtgtacggatggacggacggacagacggatggacaaatggattgaaggatgggtaggggagtcatcagatgtgttctccaacaccatgtacagtacctggcacatagcaaatctatgataaacatttgatagtaagtgaataatgaatgtcagtgccagtgttggtgtggccttaggttattctttccaggtgttgtatctgatgctggcctcatatgtttgtctcacttggctgactagaaaatccaagagaggtcccaagcaactagcccctcaccccaacatcatccgggttctccgcgccttcacctcttccgtgccgctgctgccaggggccctggtcgactaccctgatgtgctgccctcacgcctccaccctgaaggcctgggccatggccggacgctgttcctcgttatgaagaagtaagtgacagcagcgcggcagggcctggagctgatacatctcccaaggggagctggttcctgccctccatgtgcaccttgatcagggggttttggagaacagggtcatcacccttccggagaagaaagccatgcaaagggaacatatctgccctggagagcattttccctgtaggacgatttttcatggaaacaaactctcatcttcatccagaacatacttgtcacctagtccttttggtccatttgactgttaaccttttctgtggctggacttatctgtttttaacataaaaaccgttctccttcctcaccctctgtatcccctaactttgctatagtgggtattttattttaaggaaataattatctgcaccattactttgaatatagggagccccaactcttacttcctaatttgaggatggtgagtgggagggaacagaaaggatgctggggaaaagtgggaatcaaagtgctcctggaaggggaagaggaacggcctaaccctaacagtgattaaggttattaggaggccgggaatggtggctgacgcctgtaatcccagcactttggaaggcggaggtgggtagatcacttgaggtcaggagtttgagaccagcctggccaacatgatgaaaccctgtatctactaaacatacaaaaattagcctggtgtggtggcgggcacctataatcccagctactcgggaggctgaggtaggagaattgcttgaacctggaaggtggaggttgcagtgagccaagatcgtgctactgcactccagcttggcgacagagtgagactccatctcaaaaaaaaaaaaaaaaacgtattgggagtcgtcgatgtgtggtagccagaggccctctcccctctccgccagctatccctgtaccctgcgccagtacctttgtgtgaacacacccagcccccgcctcgccgccatgatgctgctgcagctgctggaaggcgtggaccatctggttcaacagggcatcgcgcacagagacctgaaatccgacaacatccttgtggagctggacccaggtaggaacctgctgcaccatcagagctctccaggggcactagagggtgggtcaggagcatttaggactgactcttcaggtcctctctggttttgtgttctaagtcatgtctttatttagctccgcacacaagaggttagcaatctctcccttagaacggggtttttttttctctctttgcagagagacagcacttcccaagttcctttctctagcccacttaaagaacaaggacctcagtgctgcaagttttcctaggtaaataaagaggcccggcacagtggctgacacctgtaatcccaacactttgggaggcttgcttgaggattgcttgaggccagcagtttgagaccagcctgggaaacagagtgagatcccttctctacaaaaaaaaaatatgttttaaattagccggaaaaaaagttagccaggcatggtggcatgcacctgtagccccagctacttgggaggctgaggtcggaggatcacttgagcctaggagttaagagtctgcaatgagctatgaatgtgccactgtactccagcctgggcagcagagtgagatcctatctcaaaaaaataataaaaaataataaagtaaaagagaagtagactttagctcattataaaaaataactttcggccgggggtagtggctcacgcctgtaatcccagcactttgagaggctgaggcgggcagatcatgaggtcaagagatcgagaccatcctggccaacatggtgaaaccccatctctactaaaaatacaaaaattagctgggcatggtggcgggcgcctgtaatctcagctacttgggaagctgaggcaggagaattgcttgaacccgggaggcggaggttgtagtgagccgagattgtgccactgcattccagcctggcgacagagtgagagtccatctcaaaataaattaattaattaattaaatttttcaaacaatgaaagctgtccaaatgtaagcccagttgcctctggaaatgagttgcctaccactggaagcattcaagtagaagctgaatggccacttgcctaggaaaattgtaaggagattcatacatctgataaatttttgaactagaagatttaaaataattgactagaggaactggcttttattatttctttatttatttacttatttatttatttatttatttgagacagaatcttgctttgttgcccaggctggagtgcagtggcgccatctcagctcactgcaacctctgcttcccaggttcaagcaattctcgtgcctccgcctcctgagtagctaggattacaggcaggtgccaccacgcctagctaatttttgatttttttttttttttttttttgagactgagtctcgctctgtcacccaggctggagtgcaatggcatgatctcggctcactgcaagctctacctcccaggttcacaccattctcctgcttcagcctcccgagtagctgggactacaggcgcccaccaccacgcccggctaatttttttgtatttttagtacagacggggtttcaccatgttagccaggatggtctctatctcctgacttcgtgatccacctgcttcggcctcccaaagcgctgggattattatttttagtggagatggggtttcactgttggccaggctggtctcaaactcctggcctcaagtgatccacccacctcagcctccaaaatgttgggattacaggtatgagccaccacgcccagctgggagttggcttttttttttttttttttttttgagacggagtctcactctgtcgcccaggctggagtgcagtggcatgatcttggctcactgcaacccctgcctatcgggttcaagcaattctcccgcctcagcctcctgagtagctgggattacaggcacacgccactacacctggctgatttttgtatttttagtagagacggggtttcaccatgttggtcaggctgatctggaactcctgacttcgtgatccgcctgcctcggcctcccaaagttctgggattacaggcgtgagccactgcgcccagccaggaactggctttttaaaggaattttgtgtggacccttttacaaataaccaattctttttttattttttctgagacagagtctcgctgtgttgctcaggctgaagtgattctcctgtctcagcctccttcacctcccaggttcaagtaattctcctgtctcagcctcccgagtagctgggatacaggcacacaccaccatgcctggctagtttttttgtatttttagtagagacaggggtttcaccatgttggccaggctggtcttgaactcctgacctcaggtgatctacccgcctcggcctcccaaaatgttggcattacaggccaccacacccggcaataactgattcttaatgcacctggttcttaggtttggatttggggtttcaaattcaaatcaaagtctcctggggtataagggcccttggagatcatttgaaccaagctctagctcctttggtcttggggacagctccaattactagaacatgatttaaattgagccacacagtcctttgcctggggattttgcagcctgtacttactggaggcatttccgtgttcgcacagcaggcccttctgatcagctctcaggccttgctgacctcctgggccaacactgagccattagcccctgtcagctatgtcttgctggtggctttagtagggacataggagggcctctcagagggaaggaggggaggagaaatggtcactttgcttgctccttcccagacggctgcccctggctggtgatcgcagattttggctgctgcctggctgatgagagcatcggcctgcagttgcccttcagcagctggtacgtggatcggggcggaaacggctgtctgatggccccagaggtgagtcccgagtgtgtcatgcgccatcggcagcccttcccccacatgtccactgaatgcaggagactcgatgccttgtgataacccaacacctccatcttttctgacccataatttggcacaagttccttccctgccactttgctttcctccggcgttccctcatgttccaggagaatgcaagtcctgtcacataaaccaggtggtctaagcagaccccttctgggtctgagccacagctcactcaagctctgggttccttgggacagagttcagattagcccatggatcaggtgatgtgcaggacatgaaaaggttagatgggcgggcagcgtgatgtctcacccactgcttctgagcaggtgtccacggcccgtcctggccccagggcagtgattgactacagcaaggctgatgcctgggcagtgggagccatcgcctatgaaatcttcgggcttgtcaatcccttctacggccagggcaaggcccaccttgaaagccgcagctaccaagaggctcagctacctgcactgcccgagtcagtgcctccagacgtgagacagttggtgagggcactgctccagcgagaggccagcaaggtgaggctgtccccggcttcgaggggacggtgtgggtagaaacctctgttctcgttccagagtgaaggtcaggtttgggccagagccacagtgacagatcctctgtgttaggaaggtaaaggctagttacaagagaacaaaaaacagattttaatgtaggtaggagtaggagcactagccaccacagcatagtcagaatcctagcagttcaactcctgtggcttttttagttgctgaaaaagttgttcagaggccagacacggtggcttacacctataatcacagcactttgggaggctgaggcgggtggatcacttgggaccaggagttccagtccagcctggccaacatggtaaaaccccgtctgtactaaaaatacaaaaattagctgagtgtcgtggcacacgcctgtaattccaggtactcgggaggctgaagcaggagaatcgtttgaaccctggaggcagaggttgcagtgagccaagatcgcgccactgcactctggcctaggtgacagtgcaagtctttgtctcaaaaaaaaaaaaaaaaaaaaaaggctattcagagagagaaaaggaggcatttttgagaaatgtttaatggagatgtagctcatggaagcagctgagaactgatcagagagagatggaaaacatctcctgagagcagatctggacattgtgaaattaatataaaggaatgcaaaggcagacctatccgaagccataattggagtggcagctggctcaggggcaggcttagtgcaaagagctgagccatacctgcaccccagcactgttctgccactccgttaactgctctctgtacgtggcctgctatcttggtgcgcagtgaaggttagaacaacagctgcaaccagttatgaaatgatagaggagactacttacctggttcaagggaccagatagctgtgcacaagaggcactaggctttccacccagggggaaaggctatttcaacaatgcatgctgccccatgcagaggtgtacacatggaaaagcttggagcacgggcaggggacaggcagtatttgtcacctgagtgaagggcatcagtaggagatagggtagaggaagaattgggttgggaccagagaagggaagaccctcactaacaaagcaggctttgggttgagactgtgttaacagatgttctagctacagcttcccttcctgttgcagagaccatctgcccgagtagccgcaaatgtgcttcatctaagcctctggggtgaacatattctagccctgaagaatctgaagttagacaagatggttggctggctcctccaacaatcggccgccactttgttggccaacaggctcacagagaagtgttgtgtggaaacaaaaatgaagatgctctttctggctaacctggagtgtgaaacgctctgccaggcagccctcctcctctgctcatggagggcagccctgtgatgtccctgcatggagctggtgaattactaaaagaacatggcatcctctgtgtcgtgatggtctgtgaatggtgagggtgggagtcaggagacaagacagcgcagagagggctggttagccggaaaaggcctcgggcttggcaaatggaagaacttgagtgagagttcagtctgcagtcctctgctcacagacatctgaaaagtgaatggccaagctggtctagtagatgaggctggactgaggaggggtaggcctgcatccacagagaggatccaggccaaggcactggctgtcagtggcagagtttggctgtgacctttgcccctaacacgaggaactcgtttgaagggggcagcgtagcatgtctgatttgccacctggatgaaggcagacatcaacatgggtcagcacgttcagttacgggagtgggaaattacatgaggcctgggcctctgcgttcccaagctgtgcgttctggaccagctactgaattattaatctcacttagcgaaagtgacggatgagcagtaagtaagtaagtgtggggatttaaacttgagggtttccctcctgactagcctctcttacaggaattgtgaaatattaaatgcaaatttacaactgcagatgacgtatgtgccttgaactgaatatttggctttaagaatgattcttatactctgaaggtgagaatattttgtgggcaggtatcaacattggggaagagatttcatgtctaactaactaactttatacatgatttttaggaagctattgcctaaatcagcgtcaacatgcagtaaaggttgtcttcaactgagctgttctagttttctcttccccagcactgtcatctagattttccatttcagtgattcccacccctcggtctactagcaacaacaactttcttgtatcctttgaggagacgttagggagaaccatcatttcacagttaaaagaaagacagtccagtcctaggcaaaatttcatgaagccacttaggattttgtatccagtcagtcatcacccacagcaacccccacccacagccattagcaaaccaggaccggggccaggtgaagtttgagggcaacatctcgctttatttttatttatttatttatttatttatttatttatttatatttgagacagagtcttaacactgttgcccaggctggagtgcaatggcgtgatctcagctcactgcaagctctgcctcttggattcatgcctttctcctgcctcagcctcccgagtagctgggactacaggtgcccaccaccacgcccagctaattttttgtacttttagtagagacagggttttaccgtgttagccaggatagtctcgatctcctgacctcgtgagccgcctgcctcggcctcccaaagtgctgggattacaggcatgagccaccgtgcctggccacgtccctattttagaaatgagaggagtgactgcacataggaaaaatgccacttttagcaattcaaagtggaaaaacttcttttatataaaaattatcccaactcccaccccttggctctcagtgttgcatctcccacagaggtaaagttgtgccattttcccacggctttaaacaaagcaaaacaaaaccaccaatcctaataacccccctccttgccccgtctccacgctgtgcggagagggctctagcccctcagtcggacttctccttctccttcatgtgcaagaagacgatgctgaagatgaagagccccagcatcatggagaaggcgctggcgtagtaggggtaggccgaggggatgaagcgctcatactgcgtgtgctggagtggccgcacggatacctgcaggaggacagaggtggcaggacctggccactgcagagcccaggcagggcacatgctagctgaaaacagaagctgtcacctgtgcttacctgagtggaagagtacaggtgtgtgtagcctagccggttgtaatccactttaaactggaatacaccatacacgtcgggcaacttgaactgaacactgtatttgccacctgcggaagaaccaacaagaataaccgggaggggtttcccagagcttttcctggttgggcctcgagagcaagtgaggcctggggccgtttctggcagcatcctcgtgcaggaactacactcacctttcttcttcaggaaggtcctcacaaaaggatcaatgcggacaaactccagctgaatgtcatcgccatcaaaggggacccatttgccatttgagagctgctggatcacgatgctatactcctgagataaaaggccaggttagccagggctggccatgactggaggccttccaccacctgcaggcagagctgcacttaattcccacccgacgaacatggcaggaatgcccaggagttcagaagacctgcagatgcccctgccacccggccctgatcagtaaccagtctctctcctcagcaaggttaatcccccaacacagcatctctgcctcttctctgaaggcctagattccttcacacagtattcatggcccatcaaagtctggacccaaaccaccctcctgccccgacatgtgccaggcactttcaagtattcatgcttccatattcgctttctcttgcctaacaaattcaacctaatgacctatttctcttattaagtccaacttcctgggcagagttaatcagtgaagcccctcccactgctgccccccatagcaaatacacacacctcttcaaaagaagtgctcctattaggacatcagttttcacgccaggctctgcatctcacctggcatgcttaggtgtagggattaactta

SEQ ID NO: 773 - DNA, 59023 bp, Homo sapiens
cgggaggatcacttgaacctgggaggtggaggttgcagtgagctgagatcgtgccactgcactccagactggatgacagagcgagactccttctcagaaacaaacaaacaaacaaacaacaaactgagccaaggcagaagcagggactgaaagagaaaaagggaggagagagagaggaagcgggaagcacgggcacagagagactcggagagagggaggagagagagaggaagcgaggttcagagagactcagagggagaaagagaatcagcaaaacacacagagacttaaaggagagaggcagagggaaaggaaggagagcaaaaggcagggacggaacagagaaaagccagatgaagacagcacagagagatgggaagagacacagaagaaaggcagagaggtccggacgcagtggctcacacctgtaatcccagcactttgggaggctgaggcaggcggatcacctgagatcaggagttcgagatcatcctgggcaacacagtgaaaccctgtctctactaaaaatacaaaattagccaggcgtggtggtgcatgcctgtaatcccaggtactcgggaggctgaggcaggaggattgcttgaacctggcaggcagaggatgtggtgagccaagatcgcaccatttcactcagcctgggcaacaggagtaaatctctgtctcaccaaaaaaaaaaaaaaaaaaaaaaaaaaagaaaggcagagagatagaaaagacagattctgcggagatgaagaacagaggggaggttgattcacaggagaaactagacagacgaaaacaacagcaagagaaaggcaggctgagtgtggggaagagacgctctgaggcaggttagccccactcccacagcaccctcagcgccactgtaccggtgatggcatgctgggagaaggcctccacgtagacgaggtagttgtggggacagtgcttcttgagccacttgcagacgtcctgctgactccacaggaccacgggccgggtcaggccacccagcgaggggcttgtatggtacaggccatagtggtcagagtacagccggccctgcaggggaggggcgtggcaggcagagtgagagtggtggagaaggagggcagggacggaggtgggtggagtgggtgggtacctggggggtgtctgtgccgggctgctgcaggagcttgattggcctgctgctggccgccctctggctgcgggagtcatgccacgtgaggctggtgccaggtgtccgaggcaagtggcaggggatgctctcagctgacaccgtgtgctccaggagggtccggcagaagctgaagtgggcagtggctgtgtgtgggggtgcctggtcagggcagtcaagggcagaaccagaggcttcctctacttgagagctagctccctgccccatctcctccacactagtgcgggaaatcacctccccaatgaggggttcccaagcctccaaaggcagaaggaagtgtgcaggacctgtttcgaggacctcacccagcacaaaaagagaagaactggaaacacctttcatcttgcaagtctacagccctcacccaggggagcaggatggattcttagatcagaggatgtgccctctagggaagggaacctgagacatatgacaagaggagctatcctgggacagccctgacctcacccttgccttgggctggcccacaagtcttgcacacaccacaccagaccaggaagtgcacacacggcctgctttgaggaaaggcagatcccgagtccggggaggtcgtctgtgctggggaaaccgggctgaggatgctgcttgcccatcgccactgaaggcacccagttcacacagccctatctggtgttggggcccgactcactgactatgactcattgacagcctgaactgtgggccaactgacaagcagggctcactccgcaaacacgcgctgggctctccagctgtgccgccccccacagggcctgcagcccgggacaacaccggccatgtgaatggtgggtacccattggatatgggcgggtcagcacaggtatgtggggtgcagccattgcttggggacccacggtgatgctctgtgctccctcttcccacagtaactgcattaaagtgtttcatctgagctttgtcatcatctctgggggcactgctgacctgagtctggggaggcaggcgtcttgatccaggtctggttacagaggggcaccccacattcattgtcaatgaatgaatgaatgaaggctctgtatggtatctgcaagtgaacagagcctgtggggagacagaaggtgggcacaggcctgcccctgtctttacagcaccctagcacccaggccttcagcagggcaggtgaggttcccacgctagggccctcatcccatccaccctagagtgagagaccctcccggcctcagactcagccacccactccacacccagggcaggggttggggatgtgtctaggaggtctaagtatcggtgaaaaccacatcctacttccccgtcctcccacgcctgtaagacttaggagacataacaccttccgcccccattcttgcaactttcaggaaccggacccctgggtgactccaaatttgaggtctggggtcagcagagggtgtgctcagtgggccaccgccccgaggtggcccctagtgctgtgggaaaaggcttattctaagcccgcgccttccagcggacaggcgccgtggtcgccgggctttgcagggcctcgagcggcggggctggtgcagaagcgcgcggcagtccggggaaacccgtcggactcctcagcccgcacggcacctgccccggccaagcaggctccgcccatttcctgcctgcactcccggagggagttccgtccgtcccgcggtctgtcggtccggtccctcccgccccaacgtcaggattccagaaggaaatggggcgggggcaccgaggcgggatgtgacctcggccccctttcggccccactgcaaaagcgggggagggttttccccgtgcgcaggaaaaggtgacccgagcgtagtgccagcctggacacaggcgccccggcttgacaccccctcaccccaagccaagggcgcgctgacccccaaggcctgaggctggctgccccctaaagcaggacaaaggctacgggaccccgttgagccgagacatccgccgaatacccccagccaccgccgctcgaagcccgccgggtcccgccccgcccccgtgcctctgggtccctgagacccccgcccgagaaatccccgctccccaatccagccccgctcaccgtccacatcccggcgctccccgaagcccgcgcgcacggccccggcgcggccacgcggggggctcagcttggacctcagctcggtgaacatggggcccgcgggtgccaggcccgcgcacacgcccctcgccgagtgcagggcggccggtgtggccggcggggaacgcgcgccgccgccccgccccgccccagccggccccgcgcccgagccggtccccgcggcccgcgagtgtgcgcgacgaggcacctgccgccgagccctgtgtgccgggcgcgctccgggagctccgaggtgtgtcggcggcgcgcgggcctgcgtgcaccaaggctgtccgccagggcgaggggcgtccgtgcgcccctgggcacggctccgcggaggagagtccccgtgaacctgccgggcgtcctctgaggtcgggcccctctgtgcgtgggggtgggctgaggggcatctcacaggggtcttctacctaccggggccaggacaaggggcaggtcaacgcctcccacacactttcctcggtctcctacgtctttactcgccttcaaataggcacccgcttccccggagaaaccagcttgactcttgcttaccgcccaccccactgtgaacatcagggtggttctcccttccctctgcagccccagaacctggctcagtgcccgggggagagggggcggtacagtgctctgtaactgaaaggggcttggcttgcctggagatggggcagaggggaactccaaggaggctgtagcaggccggagcggtgtgtttgctccaggactccagtgagaagtgctgagatggggctgggctagggaactgtggttgcctggtgcagcagcaggccaggcttgcaaccagctattcggcttgctctgcccaggagcctgggtgctctccctgggtgtatgtaggggctctggaggatgtcttacagcaggaggaccagagatgcacacagacatgtagaaatgcatgcacagagtacagtcatgcacttgcacccaaaacacgagcacacgtgacctctgtgcacacaccccactaatcacacacacagaattcacccacatgcttgacagccatgttcatgtactgacgtgttcccgacagctcagctgcggttatttatttcgtcaattagctctccaggagctaaggatgtggccctcaccagaatgtccaaggcatgttggcgggcgtgggtggggtctctagtcccactggagggacagatgcctgaatgggggttcaagaatatgagtgctaaaagcgtagggcagcagtgtgcgcacaggacgcacacagacaggtgtgcccataaccagtacacacaagctctacacaactggacagggtacagctctgctcggacagggcgcaccaggggcgagggcgggcagctgggctggttcagagggagggggccatgggttcagagggaggggaccatgggtcccactctcacagacaggtctccggactgcatcagagcactcgggaagcagcaatgccccaggctgtttttagcccccaggggccagttagggtcccagtgcaagctcgacctagcttcttccgcctctccacgaggaggcgctcccgcgcacgcgcctaccacgttcctgccccctagccgcggccggaagtcgtcgaaccaggacgtcgggacttccgcccagggaatcaaaagtgggcggggcgtgtgcggactgagcgctctgcttccggggcgcgggtgacgcgacgacggcgacactttgctacggagtgcatcggacgtcgaagcctagagtctctgcgtctttccctcttccgctgcctcattcctttccttcctagccttggtcgtcgccgccaccatgaacaagaagaagaaaccgttcctagggatgcccgcgcccctcggctacgtgccggggctgggccgggggtgaggcctggggcggcgcgcgaggggcggggacccggctacaggagcgcagtgctttggggcgtgtttgggggcgggggtctatggccgcgcagtctgaaagacgcttggtggatcggcttaatccctgcaggaagcaacgggctttggggtcaggacatacctgtgtgtgcaccctgcttgccgcctagatgtgacacattgactctcagcccagtgttttggtctgtaagatgggtaatgctgtatacggtctgcagtgaggagtagaggaatctgacgtgtagtggaaacacgcgaccaccttcctcaggtcgggctgacactccccccccccgcccgcccgcccgccccgccttaagcgtgcctgggtcctctatgcctgcaacacagatgaccaccgtgcgttgctggataagtgagcagtcgttattatcctatttggctattcatttgatgaggaacactactgggtttttcttggtggtggtattatattggaatctgtggggcacacacaagctcactaaggagggtttgctattaccataaataagtacgtaaagaggaccagatttagaacccagtgcttaatggagagtagcattggagccaagtttagtaagagagctggacttagggctgtagaaacggtgacgatagaagagaaactgacattctgcgtgtgggagttcaaaaaaagtgaggcaaggaggaagcccagggaacaggagggagtccagtgtgagtggaatgtacagcgaatagaatagagctcaggaggttggaggggccttgagcgtcaggctagagctcctggagacgttagaaagatcatgacccttcagaattattattattattattattttttgagacaaagtcttgttctgtcgcccaagctggagtgcaatggtgcgatctcagctccctgcaatctctgccccccgggttcaagcagttctctgcctcagcctcctgagtagctgggattataggtgcccgctaccacgcccggctaatttttgtatttttagtagagacagggtttcaccatgttggccaggggggtcttgaactcctgacctcatgatccacccgcctccgtctcccaaagtgctgggattacaggcgtgagccaccacgcccggcccagaattttttactcagagctgtgttttgggaagaatcatctggcagagcatgggttgaagtagaggaaggctaaaggcagggagaggtaacttggtttccagctgtgatgggagtcatagtctgggaaggagggattttgaaagtggattcattagtacttggggacagacaggatggggaaagtgggagagggaggcaaaaattacatcatggtcccgtggcatctgggacagctgttatcagctgaaaccccccagagcagctgtaaggtgggcacggaagagctcagtgtgggccaagttgggtttaagggcctggttggatgtggagggggagatgatcgaagccttagggtggagagagattgccttggtaacatcatcagggtaggctgaaactttcaggtaagcagagaagatcagaagtgtttgagactgcagttcattgtcaccaggatctttggaggtttcccaaaggtgttagaaaaagaggtgttagtaagtgataaccaggagtggagaagagcacaggaacagagttattcagacacccggtgtcttgggggtctcctgcagcgccactggcttcaccacgcggtcagacattgggcccgcccgtgatgcaaatgaccctgtggatgatcgccatgcacccccaggcaagagaaccgttggggaccagatgaagaaaaatcaggctgctgacgatgacgacgaggatctaaatgacaccaattacgatgaggtgagatgtgtccggctttcgtggctcctccagccagtctctgggagcagctgacctaaccagtgtgtgttggtgtctgtaatgaatggcttggagtggctcatgcatttaaattttagctattcatggaacatctttactgagagtgagagggagcaggaaaaacacggagaaatgtgcactttttgtccctcagaagagatgttcttgcaggtgttaggaccactgccttggcattttctattgcccagtcttttttttttttgagacggaatttcgctcttgtcggaagagatgttcttgcaggtgttaggaccactgccttggcatttcctattggccagtcttttttttttgagatggaatttcgctcttgtcggaagagatgttcttgcaggtgttaggaccactgccttggcatttcctattggccagtctttttttttttttttttttgagacggactttcgctcttgttggccaggctggagtgcagtggtgtgatctcagctcactgtgacctctgcctccccatttcaagcgattctcctgcctcagtctccaagtaactgggattacaggcatgcgccaccatgcctggctaattttgtatttttagtagagacagggtttctccatgttggtcaggctggtctcgaactcctgacttcaggttgtccgcacgcttcggcttcccaaagtgttgggattacaggcgtgagccactgcgcctggctgccagtctttaatgataaaaacttaaagtggaattggtgatagtatttgctttttttagctttagtgattgccctctaaacagacatctaaagaaaaacttcagctgactgaataccgattaactgtcttctaacagatgacatttttcctctgaggaaaatttttaaaaataattttagttttgaggccaggtgcggtagctcacacctataatcctggcacttttggaggccgaggtgggcggatcatgaggccaggatatcgagaccatcctgtttaacatggtgaaaccccgtctctactaaaactacacaaaaattagccgggcatggtggcatgtgcctgtagtcccagctactcgggaggctgaggcagaagaatgctgtgaacccgggaggcggaggttgcggtgagccaagattgcgccactgcactccagccttggcgagagtgcgagactctgtctcagaaaaaaaaaaaaaattagttttgaaataattttaaatttgcaggaatttgcaaaaatagtgcccccccaaaaaaaagtttctgcatgtctttcaccaagcttctcccgatgttacatgaccttagtgcagttattgaaacgaaggagttaacattgacacagtactattaactaatttgtcagtcgtatttgcatttcatgtttttccatgaatgtccgctttctggcttaggcttagtccaggatcccccattgcatttcgtcatgtctccttggtcccttccaattgggggtctcctctgtcttccatgcccttgacgcttgaagagtagtcaccagttatatggtagactgtcccttgatttggcttcgttggctgaagaaaataatttagcaagtatttcacaagtagagatctccgtttcgctggtggggatggtgttgaaggaaaagctgacctctacacgtgttgtttgcttctcagtttaatggctatgctgggagcctcttctcaagtggaccctacgagaaagatgatgaggaagcagatgctatctatgcagccctggataaaaggatggatgaaagaagaaaagaaagacggtaaaagaaattgttgcctttcacaatatttatccaagtttaaaaaaaagttttgtggccaggcgcagtggctcacgtgtgtaatcctagcactttgagaggctgaggtaggacgatagctagagcccaggggtttgagaccagtgtgggcaacgtagggagacttaatctctacaaataatttaaaaattagccagatggtacacacctgtagtcccagctacttgggtggctgaggtggaaggaccgtttaagcccaggaggtagaaactgcagtgagccatgatcattccagcctggttggcatagtgagaccctgtctcaaaaaaaaaaaaaagttttgttttgaattgttttatatttggagaaaagttgcaatagagtatgtgtgtctgcttagcttttaggccacctgagggtcttggtctgtcgtagccatgcctggataagcactgggctgttacagaacagccttagggcctgggggctgcagtggagagcttaagaactcttaagtttttccagaaatcagcagaattttgtggattacttttacgatacatcagggttaccatctttgaaatgaaaagggcctactgacttgattattatatgttgagtaatttgcaaatgaattaaagatgttaaatgacacatacaagctaccaagattgaaccatgaagaaatcccaaacctgaacagaccaataaaaggtaatgagatcaaagctgtaacagaaagtgtcctagcagagaacatctcaggatctgattgcttcattgctgaattttaccaaatatttgaagaagaactaataccaattctactcagactattctgaaaaatagaggagggaatacttccaaacttattctacagaaccagtattaccctgataccaaaaccagacaaagacacactgaaaaaagaaaatgttaggtcagtatccctgatgaacactgatgcagaaatcagcagaatactagcaaaccatattcaacaacacattagaaagatggttcatcggctgggcgcagtggatcacgcctgtaattctagcactttgggaggccgaggtgggcggatgatgggtcatctgaggtcaggagttcaagaccagtctggccaacctagtgaaacccagtctctactaaaaatacaaaaattagccgggcatggtgggtggtgtacgcctataatcccagctacttgggaggctgaggcaagagaatcgcttgaactcgggaggtggaggttgcagtgagccgaggtcacaacactgcactctagcctgggagacaagagcaagactccatctcaaaaaaaaaaaaaaaaaaagatcgttcatcatgaccaagtggcattttgcccaggggatacaagtgcaagggtggttcaacatatgcaaattaatcagtgttatacatcatatcaacagaatgaaggacaaaaaccatatgatctttttttttttttttttgagacggagtctcgctctgttgcccaggctggagtgcagtggcgcaatctcagctcactgcaacctccacctcctgggttcaagtgattctcctgcctcagcctcctgagtagctgggactacagttgcccgccaccacgcctggctaattttttgtatttttagtagagacgggatttcactgtgttagccaggatggtcttgatctcctgacctcatgatccacctgcctcggcctcccaaagtgctgggattacaggcgtgagccactgcgcccggcctaatcattttaattgattctgaaaatgcatttgataagattcaacattccttgatgataaaaactctcaaaaaactgcatatagaagaaacatacctcaggctgggtgtggtggctcacgtctgtaatcccagcactttgggaggctgaggcgggaggactgcttgatctcaggagtttgagaccagcctaggcaagagggtaataccttttctttacaaaaaaatacaaaaattagccaggcttcgtggcacacacctgtagtcctagctactcaggaggctgagatgggagaattacttgagcccaggaggcagaggttgcagtgagctgagatcataccaccacacttcagcctgggccacagagcgagaccctgtctcaaaaaaaaaaaaaaaaaaaagggggggggagcataacacaataaaagctatatacagctggatggggtggttcacgcctgtaatcacagccctttgggaggcccaggcaggcagatcatttgaggtcaggagtttgagaccatcctgaccaacatggtaaaaccctgtctctactaaaaatccaaagattagttgggtgtggtggctcaggcctataatttcagctactcaggaggtggaggttacagtgagctgagattgtgccactgcactccagcctgggcaacacaatgagactgtgtcgcaaagaaaaaaaaaagccacatatggtaggcccacagctcgtatcatactgaatggggaaaaactggaacgcaacaaggatgcccactttcaccactgtgattcaacattgtactggaagtcctagctagagcagtcggaccagagaaataaataaaagggcatccagattggaaaagaagaagttaaattatccttgtttgcagatgatatgatcttatatttagaaaaccctaaagactctaccaaaacactattggaactgacaaattgattaaagttgcaggctatgcccccaggtgtggtggctcacacctgtaatcccagcactttgggaggctgagggtgggtggatcacctgaggtcaggagtttgagaccagcctggccaacaaagagaaaccctgtcactattaagaatacaaaaatggccgggcacggtggctcacgcctgtaatcccagcactttgggaggccgaggcaggtggatgactggaggtcaggagttcgagaccagcctgaccaacgtggtgaaaccctgtctctactaaaaaaattacaaaagttgccaggcgctgggactcacgcctgtaatcccagcaccttgggagagtgaggtgggtggatcacttgaggtcaggagtttgagaccaggctgaccaacatagtgaaaccctgtctctactaaaaatacaaaaattagctgggtgtagtggcacacgtctgtaatcccagctactcaggaggctgaggcaagagaattgcttgaacctaggaggcaaatgttgtagtgagctgagattgcaccactgcactccagcctgagtgacggggcaagactctgtctcaaaaaaaaaaaaaaccaaaaaacaaaaattagccgggtgtgggggtgcacgcctgtagtcccagctagttgggaggctgaggcaggagaatcgcttgaacccaggaggtcgaggttgcagtgagctgagattgcaccactgcactccagcctgggtaacagagtgagactccatcttaaaataaaagaaaatatccatactacccaaagtaatttacagattcaatgcaatccgtatcaaaatactggggacattattaacagatagtgaaaaaatagccaggtgcagtggctcatgcctgtaatcccaacactttgggaggctgaggcaggtggatcacttgaggtcagcagttcgagaccagcctggctaaaccccatctctactaaaaatacaaaaattagttgggcatggtgacaggtgcctgtaatcccagctacttgggaggctgaggcaggagaatcacttgaacctggaaggcagaggttgcagtcagctgagatcgtgccattgcactccggcctgggcaacagagtgagactccgtctcaaaaaaaaaaaaagaaaaagaaaaaataattctaaaatgtacatggagccaaaaaagacccagaataggcaaagctatcctgagcaaaaggaacaaaactgggggaacacttgacttcaaattatactacagagctgtagtaacaaaaacagcatagtactggcagaaaaacagacacatagaccaatggaacagaatggacccagaaacaaataggtacctctacagtgaactcattcttgacaaatgtaccaggaatatttattggggaaaagacaatctcttcaataaacggtgctgggaaaactggatatctatatacagaagaatgaaactagacccctctctgtcaccacatacaaaaatcaaattaaaagactttaagacctcaagctgaaactactagaagaaaacattggagaaactctacaggacattggactaggcaaagatttcttgagtaataccccacaagcacaggcaacgaacggaagccaggtgtggtggctcgctcccgtgagccaagagtgcgctactgcactccagcctgggccacagagactgtctcaaaaaggaaaaaaataaaaagttctcattatagaatattaggaaaataagagtaagtatgggtaaaagcataacatttattcataagtctagaaagtaacagttaacattttggctcatttcctctttctgttgcttttttttatcttggctcactgcaacctctgcctcccgggttcaagcaattctcctgcctcagcctcccaagtagctgggattacaggtgcctgccaccacgcctggctagtttttgtattttagtagagacggggtttcaccatgttggccaggatggtctcaaactcctggccttgtgctccatccacctcggcctcccaaagtgctgggattacagacgtgagccactgcgcccagctctgttgctttttatacatgtaatcataacttcctgtgatgtatgtagaatgttttattttttgaagataattttagaatagtaaaatatagttcttctggaattttatttattttttatttttttgagtctcccaggctcaagtgattcttctgcctcagcctcccaagtagccgggattataggcacgcgccaccacacctggctaatttttgtgtttttagtagagacagggttttaccatgttggccaggccggtcttgaactcctgaccccaagtgatccacccgcctcagcctcccaaagtgttggaattacaggtatgagccaccgtgcccagtcttgccacacactttaaacaaccagatcttacgtgatgtaaacttgctgcctcgaggacagcaccaggccatcaggggtctgccctcaagactcaagtggcctcccaccaggccccacctcaaacattgggaattataattcagcatgagatttcatggggacacagatgtaaaccatatcctttggcctcccagagtgctgggattacagacataagtcaatgtgcctggcctggacatctttttagaagctcgttattaaatcattgtgcataaattttatacctatagtaattaaacgtgaatggcattgcatttcacttttttttttttttggatacaggatcttactctgtcacccagggtggagcgcggtggcttgattatagctccctgtaaccttcaattcctggctcaagcgattctcctgcttcagcctcccaggtagctgggattacaagcacgtgctaccacacccagctaatttttcttttttctttttttttttttgagatggagtctcactctattgcccaggctggagtgcaatggcgcaacctcggcttactgcaacctccgcctccagggttcaagtgattctcctgcctcagcctcccaagtggctgggattacaggcatgcaccgccacgcccggctgatttttgtagagatgggtatttttagtagagacggggtttcaccaatgttagccaggctggtcttgaactcctgcccttgtgatctgcctgccttggcctcccaaggtgctgggattacaggcttgagccaccacgccaggctcacacccagctaatttttgtctatgttgcccaggctggtcttgaactcctggcctcaagtgatccacctgcctcccctaaccttggcctcccaaagtgctaggattacaggcatgagttactacactcagccctacattttaaaaattgattggaacctccagggttaatgcattttaaaaaacatcaggctgggtgcagtggcttacatgtgtaatcctagtaccttgggaggccaaggcaggaggaccacttgagtctaggagttcgagaccagcctgggcaacatggtgaaaccctgtctctacaaaaacaaaattaaaattagccagttgcacatgcccgtagttccagctacattcccaaggctgaggcaggagcatcgcttgagcctaggaattagaggctacagtgagctatgcttatgccactgtgctccagcctgggcaacagaccaaggccgtgtctctaaaacaaaaacaaaacaaaaaacagcaggtgacacggacccatgaagaaagccattaaattaaatgtttttaaaaagtagtgtacttggccgagcacggtggctcacacctataatcccagcactttgggaggccgaggcgggcagatcatgaggtcaggagatcgagaccatcctggccaacatggtgaaaccccgtctctactaacaatacaaaaattagctgggtgtggtggtgcatgcctgtaatcccagctactcaggaggctgaggcacgagaatcacttaaacccaggaggcggaggttgcagtgagctgagatcgcaccactgcattccagcctggtgacagagtgagactgtctcaaagaaaaaaaaaaaagtagtgtacttattaaaactttttattctgaaaactgtcgtaatacaaacaagtaggaagaacagtactgtgaataccatatcctcacatgtagtctcaacaccgaagtgcaattacatgggttatgttctggcacatagagctgtgcagctgagctgagttggttagaggtgaactatttacttggaagagaaggaagcaaggaaggaaaggtgggatgagttcagtagagtgtttggagtgtttggtggtaactaggatagttactgtttttccttgtaggtgtttttttgttttgttttgttttgttttgttttgcgacaaggtctcgctctgtcgcccaggctagattggctcactgcaacctccacttcctggattcagatgattctcctgcctcagtctcccaggtagctggggattacaggtgcccaccaccatgcccagctaatttttatttttatttttatttttttgagacgaagtttcactcttgtcacccaggctggagtgcaatggcatgatcttggctccctgcaacttccacctcccaggttcaagcaattctcctacctcagcctcctgagtagctgggataacaggcatgcgccaccacgcctggctaattttcatatttttagtatagatggggttttaccacattggccaggcttgaactcctgacctcaggtgatctgcccacctcggcctcccaaagcgttgggattacaggtgtaagccaccacgcctggccttcttaggtgtttatgggatggtcctacctttgggattttgtgaattttcaagcagtaaatatacacatgtccaaatggaggtatttagatcaaagtaagatcttttttttttattttaatgaatttctacatgtttttatttggtggataattgaattagtagacttacgaatgtatttatatttatttatttagaggcagagtctctctgtgttgcccaggctggagtgcagtggtgcgatcttggctcactgcaccctctgcctcctgggttcaaatgattctgcctcagcctcccaagtagctgtgattacaggtgtgtgctaccatgcccagctaagaatgtattcatagttaccttaaaatatatttgatttgggctgggtgcggtggctcacacctgtaatcccagcactttgggaggccaaggtgggtagatcacaaggtcaggagttcgagaacagcctggccaggatggtgaaaccccgtctctactaaaaacacaaaaattagctgggagtggtggcgagcacctgtaatcccagctacttgggaggctgaggcaggaaaatcacttaaacccaggaggtggaggttgcagtgagctgagattgcgccactgcactttagcctgggtgacagagcaagactccatctcaaaaaaaaaaatgtgtgtgtgtgtgtgtgtgtgtgtgtgtgtgtgtgtatatgtatatatatatatatatatttgatttagctactaagagtatggaattgttctttttggtgatttaattgagatggataataaatttgcttcagaacagacatgcagtgtttctgatgtgtgcatgttttatttcctagggagcaaagggagaaagaagaaatagagaaatatcgtatggaacgccccaaaatccaacagcagttctcagacctcaaggtgagccgatgaagcggtgaatggtgtgcggtttctaacgctctcaccctaacccgcagagactcagactgctcttacgtggaatttatgagactttacgtttttaatttagggggtcattgcttagaagaagaaagtgtttgcttcagtatgtttaattatatgtgtgtaaaaaaaaacccttcccctactgtaaaaggtaggacaaatgaacttattttctttgtaattttgactccatttatacctaagattttcttttttcttttttctttttttttttggaggcagtctggctctgttgccctggctggagtgcagtggcgtggtctcagctcactgcaaccttcacctcctaggttcaagcaattcttgtgcctcagcctcctaagtagctgggattacaggtgcctgccaccatacccagctaatttttgtatttttagtaaagacaggatttcgccatgtgtaccaggctggtctcaaactcctgaactctagtgatctgcccacctcagcctcccaaagggctgggattacaggcgtgagccaccacgtctggccccatttatacgtaagattttctaaactgtgtcccctgggctttgagagaataatttacattttagtgaagttgaacagatccaataaattgatttttcttttctttttcttttttttttttttttgagacggagtttggctcttgttgcccaggctggagtgcaatgacgcgatctcagctcaccgcaacctccgcctcccaggttcaaacgattctcctgcctcagcctccctagtagctgggattacaggcatgtgccaccatgcccggctaattttgtatttttagtagagatggggtttctccatgttggtcaggctggtctcgaactcccgacctcaggtgatctgcccgctttggcctcccaaagtgctgggattaacaggcatgagccaccgtgcccggcctaaattgatttttctaagtgaagtagaaaactatttttggggctgggtacagtggctcacatctgtaatctcagcactttgggaggctgaggtgggaggatcacttgagcccaggagtttgagaccagccttggggagaacctgtctttacaaaaaataaaaacttagccaggcatggtggcccacgcttgtggtcccagcaacttgagaagctgaagtgggaggatcacttgagcctgggaggttgaggctgcagtgagctgtgattgtgccactgaatccagcctgggcaacagaatgagacccatctcaaaacaaaagtaaaaaacagttgctgcatccaaatcccttctaaagcttggtgatctggaggctaggggtgagagagggcatggtcctacctgggcacatgaaattctgtcagagaattaatgtttttgggggctggatatttccagaggaagttggcagaagtcacagaagaagagtggctgagcatccccgaggttggcgatgccagaaataaacgtcagcggaacccacgctatgagaagctgacccctgttcctgacagtttctttgccaaacatttacagaccggagagaaccatacctcagtggatccccgacaaactgtgagcttccaaaaaagggcacatgtggcccatttagtcctgttagatcagtggcaggaatggtgggtggtgttggattcaatgcttctgcaggtcatggctatgctgtggccgagtctgtctgcacagctgtgcatatgtcaggccactggggaagtatttcagagagtaaatttcttgggcatgcagtgcaaaccgttgttttattcttgcctttcctctcttcccctccagcaatttggaggtcttaacacaccctatccaggtggactaaacactccatacccaggtggaatgacgccaggactgatgacacctggcacaggtgagctggacatgaggaagattggccaagcgaggaacactctgatggacatgaggctgagccaggtgagtttgtcacacagcattttcctgtggacaggtttagacagtttaattttgttttgttttctttttctccttcttcttcttctcctttttcttctcctccttctcctcctcctccttcttctccttctcctttttttttttttggcttgatttttgcctgaataattccgcagatttttaaaattttgacccagagtcttgctgtgtcactcagaggctggagtgcaatggtgtgatcttggctcactgcaacctccacctcctgggttcaagtgattctcctacctcagcctcctgagtagctgggattacaggtgcccaccaccacacccggctaatttttgtattttttgtagagacggggttttaccatgttggccaggctggtcttgaactcctgacctcaggtgatctgtctgccttggcctcccaaaatgcggggattacaggtgtgagccactgcacttggcctttttttaaaatataaaataataattttttaaaaagtgtgtttttttcctgcctctcagtaaattgtcttgtggccctgcatggaacgtgtactttgatctggagactaggtgctctagacaccagtgaagtacagaactctttctgatatgcatatcagataccacgaaggaacatactacttttggcctggccaacatggtgaaaccccgtctctactaaaaatacagaaattggccaggtgtggtggcgggcgcctgtaatcccagctacttgggaggctaaggcaggagaattgcttgaacccgggcgttggaggttgcagtgagccgagattgcaccagtgcactccggcctgggcaacagagtgagactgtctcaaaataaaaaacaaaaacaaaaacaaaaagtggcacaatcatggctggctacatacagccttgacctccctgggctaaggcgatccttccacctcagcctgccaagtagctgagattacaggcatgtgccaccatacccaactaatttttgtattttttgttgagatggggtgtcactaggttgcccaacctgggctggagctcctgggcacaagtgatctgtccgcgctggcctcacaaagtgctgggattacaggtgtgaactaccatgcccagcctgaaatttgtttacatagaaattgtaaaactttttgggccaggcactcatgcctgtaatcctagcactttgagagaccaaggtaggaggattgcttgaggtcaggagttcaagaccagcctgggcaacatggtgatggtgagactctgtctctacaaaaactaaaagaaatagctgggcctggtggtgcctgtagtcccagctgttcgagaggctgaggtggaaggattgcttgagctagggagtttgaggctgccatgagctatgatcgcgcctctgcacaccagcctgggttacggagtgagactgtctcaataaataaataaaactgtcacagtaatttttttgtggtaaaatatatgtaacacagaatttaccattttaatcattcttgactgtacataccttcactgacataattatgttcatgttgttatacaacctcatcaccattcatctccagaactgttttcatcttcccaaattgaaactccgtacctgttaaacattgagtccccgtgcgctttctccccagcccctggcatccaccgttctctctgtttctataaatgtcactactctctggatcttatatgactggaatcatacagtatttaccttactgtgacaggcttatttcaattagctcatggtgcagcatgcgtcagcatgttcttttttttttttttttttttgagacagagtctctctctgtcacccaggctggagttcaatggcatggtcttggctcactgcagcctccgcctctcgggttcaaatgattctcccacctgagcctcccaagtagctgggactacaggtgtgcaccaccaagcccagctaatttttttttttttttttgagacggagcctggcaccgtcacccgagctggagtgcagtggtgtgatctcggctcactgcaacctccacctcctgggttcaggtgattctcctgcctcagcctcccgagtagctggaactataggcgtgtgccaccatgtctggctaatttttgtatttttagtagagacggggtttcatcatgttggccaggatggtcttgatctcctgacctcgtgatccactcgcctcagcctcccaggatgctgggattagaagtgtgatttttttgtatttttagttagagatgggatttcaccatgttggccaggctggtctcgaactcctgacctccagtgatccacgtggctcggcctcccaaagtgctgggattacaggcatgagccccggcgccccggccagcatgttctcagtttaaggcaggatgagacttgactctttggtgtgtgtggaccgcattcgctcatctatgtagaccgcattcgctgacctgtttattcgctgacggacacttggaccactttcaccttttgactattgtgaataatgctgctgtgaatacgggtgtacagatatttgtcagagaccctgctttctattctttcttttttaataaaaattttatttatttttttttgagacggggtcttgctctgtcacccaggctggagggcagtggcgtgatctcggctcactgcagcctctgcttcccaggttcatgtgattctcctgcctcagcctcctgagtagctgggactacaggcatgtgccaccacgcctggctaatttttgtatttttagtagacacggggtttcaccatcctggccaggctggtctcgaactcctgatcttgtgatccacccaccttggcctcccaaagtgctgggtttacaggcgtgagccaccacgcctggtcaaaaattacacttttttttgtagagacagaatcttgggaggctgaggcaggaggattccttgagcccaggagctggaggctgcactgagctatgattgccactgcactcctgcttgggtgacagagtgagaccctgtctcaaaaaaataaataaaaatatagatcttggacagacgcggtggctcacgcctgtaatcccagcactttgggaggccgaggcgggcggatcacgaggtcaggagatcgagaccatcctggctaacacggtgaaaccccgtctctactaaaaatacaaaaaaattagccaggtgtggtggcgggcgcctgtagtcccagccactcgggaggctgaggcaggaggatggcgtgaacctgggaggtggagcttgcagtgagccgagattgcacaactgcactccagcctgggcgacagagcgagactccatctcaaaaaaaaaaaaaaaatagatctttttccatacagaagaaatttgttattatcacaaggtgttgtctgagtgaaatgaaggctgttttccttctccttctgactgctctctcagggttgtgggaggggcaccagggaccctctgagaactttgttttgcacctggtcatgtccagctgactcttagcttggcctgtctcacaggtgtctgactccgtgagtggacagaccgtcgttgaccccaaaggctacctgacggatttaaattccatgatcccgacacacggaggagacatcaagtgagtgctttgcagaatcgctgggctgggatggagactctagttgcctagggtattttggattttatatggacagtatgctgtcaaaatgggacatggcggttctaagaaatgtaaagtggagtagtttgttttttccatttgaaatgtatctgtatccattcattgcgtacactcaatgtgttacatatgatactgcaaagtccctgcctgtgctgggcaggaaagcagctggctgtgtcccacatgtcccatctggaccttcggttctcagcgtttgtctgcggggaggctacagaggcttggaatagtgcgcactgaggttttgagttggtttttgtaactcaggacatcaggactgatagttcttacattgtgactgtgaagtgggtgccctcatcccaggtctcgggtgcacccctgacagcatggcctgatgccgtgtgcactctccctctcatagtgatatcaagaaggcgcgactgctcctcaagtctgttcgggagacgaaccctcatcacccgccagcctggattgcatcagcccgcctggaagaagtcactgggaagctacaagtagctcggaaccttatcatgaaggggacggagatgtgccccaaggtgaggtatttcctgggaggcgtttcctgggaggctgcgtgattgtggcccctacgggagtaaacttgttagagcaaatctctttgtcttttggtattgaaactacagacaatagggcaggctgggggaggatgtgaaaagcagccaagggctttttcctgcttgttttcatgtggagtgaaggctaatccaccactttttttttttttggagacggagtctcgctctgtcacccaggctggagtgcagtggcacgatctcggctcaccgcaagctccacctgccaggttcacaccattgtcctgtctcagcctccagagtagctggcactataggcgcccgccaccatgcctgaatccaccacgcctgaatccaccactggtttgacggcaggctaagcttcattataaagagctcagttggtcagctcttcacccgcctaatggtggccagtcacggtggctcacgcctgtaatcccagcactttgggaggctgaggcgggtggatcacttgaggtcaggagttagaaaccagcctggccaacatggcgaaaccccgtctctactaaaaatatgaaagttagccaggcgtcgtgacaggtgcccataatcccagctattcggtaggtggaggttgcagtgagctgagattgcaccatgctgctccagcctgggcgacagagcgagattccgtctcaaaaaaaaaaaaaaaaacaacaaaaaagaacgacccgagcagatgtgcagtctctgctttgtccatggagttgtcctgaaggaaatcatgctcttttcacaaagtggtgtttcattttttttttttctttttttttgagtctcgctctgttgcccaggctgaagtacagtggcgtgatctcagctcactgcaacctctgcctcccgggttcaagcaattctcctgcctcagcctcctgagtacctgggattataggcacctgccaccacacccggctaatttttgtagttttagtagagacagggttttgccatgttggccaggctggtctcaaactcctgacctcatgatccacctgcctcggcctcccaaagggctgggattacaggcgtgagccaccgcgcccggccattaggtgttcttcagtcagacatatggtagccatgttcccaagtgtggttataagggggcgactcctggtgcaggtgtgttagaggctgagctaattggctttcgtaaattctggggcccgaggatctgctctggagatctgtgcctgctgccctgttgcggcttccagcctgcactgagccttattggtcttatctcttgcctcacagagtgaagatgtctggctggaagcagccaggttgcagcctggggacacagccaaggccgtggtagcccaagctgtccgtcatctcccacagtctgtcaggatttacatcagagccgcagagctggaaacggacattcgtgcaaagaagcgggttcttcggaaaggtgagcctccctcggaggtgctgctttctccctccttggggcccctcctctcagcagctttcctgctcctggctcaggcttttggtgagagtggataaggaaccagggacatttttcaggccttttctcaggctgggttgcctctgcccttggacccccatgggggagggatactgtggtgggcaagttcccatcctggaagggatgcttgggttgagccctcactcctgcctttttccagtgtgtgatcttggatgcttgggcggtcactctggtccaggcttccctcatctgcagggtgagaacaacggtagctcaaagcctgtgtcctggggctctggagatggtctgtgtgaagagctgagccggcacctggcacgtgcagacccgttgtgggtgttactcattttctctcctgagaaggcaccagagccacacgttgattgaactctttcctgctgctgacgaggctgtgccttctgctcccgcgatgcagcgtgtgccgtcagctcaggtcagataacgacagacggtgtgcctaccaggcaacctgattccatccagggattcctgccagggtagagcttttgtgggtagtttgtttatttttattactgtggattcataaaaggagcactgtttctcctgtcactggaagtgtgtagtagatgctgctcttgaactgggtccagaacgagtgctagtcagggggctgttctgaagctaatctgtgcaggtggcttcttttttttcattttttgttttttttttctggttttttttttttttttttttttgagatggagtctcgccctgtcgcccaggctggagtgcagtggcgtgatctcggctcactgcaagctccgcctcccgggttcacaccattctcctgcctcagcctcctgagtagctgggactacaggcgcctgccaccacgcctggctaatttctttttgtatttttagtagagatggggtttcactgtgttatccaggatggtctcgatctcttggccttgtgatctgcctgcctcggcctcccaaagtgctgggattccaggcgtgagccactgcacctggcctatgcaggtggcttctatccatttttttttttttagacagagtctcgctttgtcgcccaggctggagtacaggggcacgatcttggctcactgcagcctctgcctcccgggttcaagtgattctcctgcctcagcctcccgagtagccgggattacaggtgtgcgcctccatgcctggccaatttttgtatttttagtagagatggggtttccccatgttggccgggctggtctcaaactcctgaccacaagtgatcctcctgccttggcctcccaaagtgcagggattacaggcgtgagcccctgtgcctggccttttcttttcttttttttttttttttgagatggagtctcactttgtcccccaggctggagtgcaatggcaccatcttggctcactgcaacctccgcctcctgggtttaagcaatcctcttgcctcagccttctgaggagctgggactacaggcacctgccaccacgcctgcttaatttttgtatttttagtagagacggggtttcactgtgttgaccaggctggtcttgaacttctcacctcaagtgatccacccacctcgacctcccaaagtgctgggattacaggcgtgagccactgtgcccggccagattttttttttttttttgagacagcgtcttgctctgtcacccaggctggagtgcagtggcacgatcttggctcactgcagccaccacctcccaggctcaggcgatcctcccagcttagcctcccaagtagctgggagtataggtcccacccccatgcccagctatttttaatttttggtagagatgggatcttgctgtgttgtccaagcttgtctcaaactcccatcctcaagtgatcctcctgccttgatctcccagagagctgggattacaggcatcagccgtcgcatccagcctattcttcctgaatttatagcctaggaaaaataaagtgtattttatggaatcaagggcagttttcagtgagagctttccagctcttgtttttccaaatgtctttaagcgaaatatcccattgaggcttctgtgctgataggaccgtgcagatgagggctctttggtagaaagccccttatcaaatatagtttcattcacttactgtctacgtctgttagaagacaggtgaaggctgcttgcctgtgatgcatgttcccccgaccctgtgcactcacatgtgaacgtgctttcctctgtcgaggctggtttcttgaccgcagcccagctgctcagtgaatgctcagagacagcctcttttatttttttttattgagacagagtctcgctctgtcgcccagcctggagtgcagtggcacgacctcggctctctgcaagctccgcctcccaggttcacgccattctcctgcctcagccccccaagtagctgggactacaggcgcccgccaccaggcctggctaatttttttttgtatttttattagagatggggtttcaccatgttagccaggatggtcttgatctcctgacctcatgatccacccgcctcggcctctcaaagtgctgggattacaggcgtgagccaccgcgcccggccagagacagcgtcttataatgaggtggccaggaacagaaagttagcacctgtctgggtttgtagaaatcagtttatcttttttcagctaggaagaaatagttctttgatgaagagcccatgaaagtctgggtaattagtattgtttacttagaaaagctctattgaattcttcctgccacagtttgatgaatgatcatgaatgtctttgtggccactccctgctcaccaccagattgtctgggttcatttccagttggtttggatttggagatgggagtatgctgttggaggcgggggccttcggggagtgttgagggactgtgtttccacggctgttctctcagggagtggcctcctggctgtgctctctcaggcagagaagctgggctaaggtggaatgaacccaggatctccaggatggcctttgccgctgccctaatactggtcctggcctgccctttcccaagagtgtttccaaaaactgtattcttttcctggggtgaagcccagcactgcttcatttggttattagcaaacacttacacgttgcttgaagggtctggtttttgaaattaagatgacagctacttccactggtgacttaggacacctgccagccagggagcctggcagtgcatggtctctgtgagctctgggtcgctgttgggctgagctgacaccttagtcctttgttgggagaatgggcgttttgggtgctgatcttgagacctgaggaggctgagtaaccttaggcatggtgcttggcctctgagcttccatgtcttcctctgtaaaagggaagagggctttcaggattggggagggtgcagcatgtgagcttcctggccagggtggggtgtcccacgtgcagagtcccctggggaggcccgactggcagctcccctacaataatgcactcacatgctgtgtactccgctagttaatgcagatgtgtggaagtggagttattttacactaacgccatatgctctggcctgtgaagcgtggcatccttcagtggccgtcgccagcgtgtccctctgggggcacaggaatggcacagttcaggttgagggtcttccctgcagtcacgtgacccccggagagcatgttggcctctgcacggtcacgtcttcatggctgtgtctagcattcagaatactcttctgttctaggccaacttcaggggtgtgtgcttcctccacttctgctcataaagtcacactccttgaaggccattgtatcatggtgtgccatgtggcttccgaaagcacctggggaaggtgaccttgttggttttagtgccatgcctgtgggctgctgatgagatgccatggagatatgtcagctctctcccaaaacttgaagacacagagtcctgggagtcgtaagttaatgactccataaattgagtcccgcatgaatattctgttctttagagacgcgaagttcatctccaccaatgtacaaagtattaagggaagtagttcatatttagacaaatagagcactcatctcccacgcagtcgaggtgagagcgcacaggaaaaacaactgggtcgttctgtgtcttctctctatgcctagtcgcctggttggaggttaggactttccttctttactgctgtgccctctgctgtcaccctgcttggtcagggttcttgacctggatgagtaacccaaatcttttttttgttttagacagagcctcgtcctattgcccaggctggagagcagtgttgcaatcagctcactgcagcctcaacctcctgggctgtagtgatcctcctgcttctggctcttgagtagctgggaccataggtacatactaccatgcctaaataatttttattttgagacaggatcttgctctgttgcctaggctggagtgcagtggcatgatcatgggtcactgaagcctcaacctcccagactcaaactatcctccagtctcagcttcctgaatagctgggactccagggacataccaccatgcctggctgagtttttaatttttcaaagagacgaggtctccctgtgtcatccaggctggttttaaactcctgggctcaagtgatcctcccacctcagtctcccaaaatgctgggactgcagatgggggccactgtgctcagccaggacccatatctttatccccaaagggtctgacttgttggtagttttgcttttttggtggctgtagttcccattaacttttactggtaaaagcagaaatactaaactgtttttaggactggcctctagatagtctcccacagtgggtggcagcaactcagtctcgctttgggagtcagggttagcctctccagccagggctggtacatgaggaggccagagggagctgtggtctgcaccctggttggcacatactccctttggagtagctcgtagcttgctcttttttttttttttttttgagactgagtcttgctctgttgcccaggctagagtgcagtggcgcaatctcggctcactgcaacctccgcctcctgggttcaaggaattctcttgcctcagcctcccaagtagatgggattacaggcacctgccaccacacccgactaatttttgtatttttaatagagatggggtttggtttcactgtgttggccaggctggtctcgaactcctgacctcatgatccacccgcttcagcttcccaaagtgctgggattacaaatgtgagccaccacacccggcctttggaccagctctcttgacaggagggtccaaggaggcggagacgggactcttggcagtggagacgggacttgtggcagcggagatgggacttgagccattcagacatcactgtttattcctagacccgtgtgttctggctgtgagatccagccgggattggtgtctattcacagcatttgtggcatcctactgggctgccaggccatggctctgagtgatgggcacatggtaagaccatgttctgcctgaatcggtgaattcatatagcttcgtcttctggccgtctttcagttggtcaagtggacatccagataataaggccaggggtgtcagtgccagtgtgctgtgcagaaccatgcgtaaaccacagcagacttttgtcttctcagtcccttgaccctaagggactccccagaggttgtcagtgtgggctgagggaggaaagcggttgagcagccaccagtgcaggaggcatctgccccatagcttaggcagctgtgctgcacctgccttccttccacaccatctcctgggtgccatttccaccctatgaggccactgctgcatctgcccaaccttgtggcttggtctgtcagtaacacctggagtgggcagcaggttgctcagtcattttatgtcccttagctgagtgttcattccctgccagggcctcacagccagcctggggctgtttctcagcaggagagcaggtacctgcaggagagctagctcacttgccctctcccctccccgcctcccctcccctctgcctcccgtcccctcttcccctccccgcctccgcttccctccccgcctcccctcccctgccctgcccttttcctcttttttttttttttgagactgagtctccctcttttgcctaggctggagctggagttcagtggtgcagttttggctcactgcaacctccacctcctgggctcaagcgattctcccacctctgcctcccagctagctggaaccacaagtacatgccaccacgcccagctaatttttgtattttttgtagagacagggtttcgccatgttgtccaggctagtctcgaattcctgggctcaagcgatcctcccacctcagcctcccaaaatgctgggattataggtgtgaaccaccacaatcagctgcctggcctaatttctttttcttttttttgagttggagtctctctctgtcacccaggctagagtgcagtgtcacagtctcagcttattgcacctgcgccttctgggttcaagcgattctcctgcctcagcctccccagtagctgggattacaggtgcatgccaccatacctggctaatttttgtatttttagtagagacaaggtttcactgtgttggccacgctggtctcgaactcctgacctcaggtgatctgcccacttcgacctcccaaagtgctgggattacaggcgtgagctacgggctgtacctggcccggcctaatttcttaacatcattaaatgtctactgcattcatatttttccagctgtcatgtcagtacctgcacgggcacatgcatgcataaccacatgcacacatggttggtttgaatcaggatctaagcaaagtctgaacattgccgtttggttgatgtcttctctcggtttgttgatggaattgggttgtttttccttgagattcctcacatcagggtttgctcactgcagcctgtgagattgtttcatgtgggtctcgtttcctgtatcctctgtttcctgtatcctcttgtaaattggaaggtagatttggagactcataagagtaagctttgtgttttttttttctttttttatcaaggaaatattcgtggcaatgcaagcagcgtcaggagctgcagaggctgtcactgctcagtggccccagtgtccttcatggagttctccacagcctttcagctcctgcctttggcagtggctggtgacccgtgcccgcatctgttccttcattagggtgtgcaaaacggtgacattataattaggtcactctttgcttttattgccagaattattcttaagagaagaattttcctatatccatgatttggttattctgagtttatttgggaaagacagaatagatatttgatttgcttcctttcaactttcgggatgatgcgttgattctctagcattctccaaaggtgactaatggtctcttggagctttgttatgaactattgaatgctgtggtatttcatgggtttgaatacattgcaggtaatattcttaatatgcttattgaccttcagactctctgatcattgtccagtggaagtctcttctagtttgctcttgaattttttttaagttttaggtatttttatttaagggaaaacatgtaataatgaggtattttaggtcgggcgtggtggctcatgcctgtaatcccagcacttcgggaggccgaggcgggcggatcatgtggtcaagagatcaaaccatcctagccaacatggtgaaaccctgtctctgctaaaatttcaaaaattagctgggtatggtggctgcacgcctgtactcagctacttgggaggctgaggcaggagaatcgcttgaacccgggtggcagaggttgcagtgagccgagatcacgccactgcactccagcctggcgacagagcgagactccatcgcaaaaaaaaaaaaaaaaaaaaaaaagagaggtatttcagacactggcattttttcgtaaatatttgaagtgaattacgtagatcttaagtgtgcagtttgatgtcttcacaagtgcatgcacccctgtaacccacactcgaccaaggcatagagcatttccagggtgggcaccgtggctgacgcccataatcccagcactttgggaagccgaagcgggcggatcacttgagatcaggagtttgagaccagcctggccaatatggtgaaaccccgtccctactaaaaatacaaaaattagccaggcgtggtggtgcgcacctgtagtcccagctaccttagaggctgagacaggagaatctctgaacccaggaagcggaggtagcagtcagctgagatcgtgccattgtactccagcctgggcaatagaatgagactctgtctcaaaacaaaaacaaaaacatttccatccccgcagaaagtcccctggtgcctctcaatcaatccatactatccccattcgttggcagtcatgcttctgacttattttaccaagattagttttgcctcttttcagacgtcacataaagggagtcatatagtataaactgttttgggactggtttcttttgttcagcatgtttttgaggttcattcccgtggtcactggtttcctgagtcctgttgatatgaccctggcagtcttcagtcacttccttgctttctgctaccacaagatgctccgtttgtccttgtttgtgtctgccccagacctgaaggaagccacataaagggcaggtgtgtggtccctgactgtcaaccagggaagtccgtctcatcctgaccagcagcatgctcaccacatgagcctcctgtttttatctccttttctgtgacgtggtttctcgtttgacctttcctagccctcgagcatgttccaaactcggttcgcttgtggaaagcagccgttgagctggaagaacctgaagatgctagaatcatgctgagccgagctgtggagtgctgccccaccagcgtggaggtgagtctggcgggctcagggccaccagagcccaaagtggccaaggcctgagcccaggttcagtgtctggaagtgatgatacaagtggagcattgagctcactcaggctgcaatttctgggagcagaaggccctgtggaaccccaggatgccgttctgtacatagccgctaggcagggtggtcagtggcctcagctagctgtgctcttaatggacgtgcagggagaatcttagctcatacctgaccactgcagaaaattctctgttgggcagttgctcaggggccatttcctctcagcagcccagagtttgtcatgggagccgaaggtggcagcgtgatagaaaacattgctttctgtcagctccgcatgactgctctttgcctctaagctaagtgggatttctttggttttaagcattccagttcacagcattctgtgcagtgatttttagtcttggttttatgatacctagtatgtctttaattatcctaaggggtattgtgaaattctccaaacaacattaatcttattttatttacataaaaatgaataaagcccgtacacatcttagggatggaatgctgcagaaccaagggtctgggaacttcaggaggctgaacacccttctgtgtgtttagcctgtgagggcagtagcctcatcctgctcgtctgtgccagcccctggtatcaggtctggcgtgctgtgtgcctggaggctgtgtttgtgaacattcaactgagaatcttttgatgctcacgagagtcactaaatgagtcagaagcataaaggaacagttggtcaggtgagaagtgctgctgtggacacttctcaggccatgttcagatggttctcgagagctaagaaagaacgtggtggccaacgctggagggtgggtcgctgtctggcctgcagctgtccccccagcacagtgtcctctcctttttctcgtgtcctctccgcgtagctctggcttgctctggcaaggctggagacctatgaaaatgcccgcaaggtcttgaacaaggcgcgggagaacattcctacagaccgacatatctggatcacggctgctaagctggaggaagccaatgggaacacgcagatggtggagaagatcatcgaccgagccatcacctcgctgcgggccaacggtgtggagatcaaccgtgagcagtggatccaggtgggccgcaggcgggtgtcgtggtgtctgctttaacagtgcacatgcagcacgtgagagtcccacgcaggactgggggttgctggatggtactggggagtcctgtgccaaaccagaagcaggcacaggtgtgaatgggccctgagggacctgggcatgcccactgtcgctcttgatggattcaggcctggagttcgtcttggggtgaacacttcagaagccctttcagtgtgtgcacacctgactgcatttctttgctagtagaaatgatacacctacgagaggaggacaggaagtctcatggcttctttctttgctagtagaaatgatacacctacgagaggaggacaggaagtctcacggcttctttctttgctagtagaaatgatacacctacgagaggaggacaggaagtctcacggcttctttctttgctagtagaaatgatacacctacgagaggaggacaggaagtctcacggcttctttctttgctagtagaaatgatacacctacgagaggaggacaggaagtctcacggcttctttctttgctagtagaaatgatacacctacgagaggaggacaggaagtctcacggcttctttctttgctagtagaaatgatacacctacgagaggaggacaggaagtctcacggcttctttctttgctagtagaaatgatacacctacgagaggaggacaggaagtctcacggcttctttctttgctagtagaaatgatacacctacgagaggaggacaggaagtctcacggcttctttctttgctagtagaaatgatacacctacgagaggaggacaggaagtctcacggcttctttctttgctagtagaaatgatacacctacgagaggaggacaggaagtctcacggcttctttctttgctagtagaaatgatacacctacgagaggaggacaggaagtctcacggcttctttctttgctagtagaaatgatacacctacgagaggaggacaggaagtctcacggcttctttctttgctagtagaaatgatacacctacgagaggaggacaggaagtctcacggctttctttgctagtagaaatgatacacctacgagaggaggacaggaagtctcacggcttctttctttgctagtagaaatgatacacctacgagaggaggacaggaagtctcacggcttctttctttgctagtagaaatgatacacctacgagaggaggacaggaagtctcacggcttctttctttgctagtagaaatgatacacctacgagaggaggacaggaagtctcacggcttctttctttgctagtagaaatgatacacctacgagaggaggacaggaagtctcatggcttctttctttgctagtagaaatgatacacctacgagaggaggacaggaagtctcatggcttcttttactcttcccctctcccccacaccctttttttttttttttttttgagagggagtctttctgtcacccaggctagagggctagagtgcagtggcacgatcttggcttactgcaacctccacctcttgggttcaagcagttctcctacgtcagtcacctgagtagctgggattacaggcacccgccaccatacccagctaatttttgtatttttagaagagacagagtttcaccatgttggccaggttggtctcgaactcctgacctcaagcaacctgcccgccttggtcttccctgtcttttatctttgtctgtagacttaaggctatagaaaagtttccaaagatgatctaacttaggaagtagggcttgggttccctctaatgccttcttttaaggagtcacccactgagttatgtttctctcaagaaaaataaataatgaaattactattttctgttatattttatgacagtttgtctttctttccttccttcctttcttcttctttctttctttccttctttctttcttgagacagggtctcgccgtgttgctcaggccggagtgcagtggtgcagtcatggctcactgcatccttgacctgggctcaagcaatcctcccgccttaacctcccaagtggctgggactacaggcgtgtgccaccatgcttggccaattttttttatttttattttttgtcttgttatgctgcccaggctggtcttaaactcctggccttaagcaatcctgccacttcagcctcccaaagtgttgagattacaggcatcagctgccatacccagcatatgacaggttattaagctataactagcgttctacagaatccacccatttaaagtttacgattcagtggttttagtatattcacagagctatgcgctatcaccacaatcctagaaccttctcatcaccccagaaagaaatcctgtgtccgtgagttgttgctccccattttcatacctctgtagccttttgtttttgtttttgttttttttttgagacagggtgggtctctgtctcccaagctggagtgtatggtgcaatcaatcttggctctctgccacatttgcttcctgggctcaagcaattctcctgcctcagcctcctgagtagctgggactacaggcatgcgccaccacacctggctaatttttttctattttttgtagagacgcggttttgccatgttgttcaggctggtctcaaactcctgagctcagatgatccacctgcctcggcctcccagagtgctgggattacaagcgtgagccaccgtgcctgtctaaccttgtttttttactttctttctctacacatttttttctggacattttatatacagatgttcaacttatgggcttatatcctgataaacccattgtaagttgaaaatatcataagtctaaaatggatttgaggctgggtgctgtggctcacacctataatctcagcacattgcggggctgaggcgggtggatcacttgaggtcaggagtttgagaccagcctggccaacatggtaaaaccctgtctctactaaagatacaaaaaaattagccaggcatgatggtgggcacctataattccagctactcgggaggctgaggcaggagaattgcttgaacctggcggaggcagaggttgcagtgagccgagatcgtgacactgtactccagcctgggcaaaagagcgagactctgtctcaaaaaataaataaaataaaataaaatgaaataaaatgcgtgtgatacacctaacctactgaactttacagcttagcctgcctacgtcaaacatgctcagaacacctaccttagcctacagttgggcagagtcatcgaacgtaaagtgttgaataactcacgtaatttattgaatgctacgatgaaagtgaaaaacagactggtggtttgagtcaaagtattgcttctactgagcgtggtggcttttgcatcgtccgacaccgtgagtggaatcacacgacacgtggtcttttgtgactggccttaacttagtgtgttttcagggttcctccatgttgtagcatggaggtattgaaatcctttgcctacttttacattggattgtgtctttattatggtctatgtattatttttgtctgttgttttattattgagttgtaagagatgtttttatatattctggatatattgtcacttatcagagacatgatttgcaactacagatggtccctgacttcccatggtttgacttttgccgtggttcaaaagcagtttgcattcagtagaaactgtccatggaggaagagccagcgcagtttgcgttcagtagaaactgtccatggaggaagagccagcacctttgccgcaggcccctgagggtctgggtgctgggtccttgccccacgcattcttctcaccactgacctttgtgccagcgtctctgcctcagatccttgctcttggctctgctttctgtctgggatggttttctggtgctggcagggccctgggagggtctgggaggcatgtggctccggttgcactttgctcacggtccatgtcgtggtcccccatgttggcatgccgcagtggtgcctgtgctcctgcaccctgttgctctggctgggttattgttctcttgttggtagacacattctcttgcacacatgggaatatatttgtcacatgaatgccttaaagtagaactgctgggtcaaatatgtgcctgttttattttgatagagaatgagaaattgccctccatagagatatgtgcttctttgcagtataagatttatgcccccttcaccaagtgagccagtcagcacatgtttcaatgttgctcatctgatacgtgcacaatggtacttagaatagtttaattagcatcttgaaaataagaataggggctgggtgtggtggcttatgcactaatcccagcactttgggaggctaaagcaggagggttacttgagaccaggagtttaacaccagcctaggcaacataaggagaccctgtatctatgaaacataatgtaccattgagcatggtggtgcatgtctgtgctactcgggaggctgaggtgagagtatcccttgagcctgggagttggaagctgcagtgaactatgattgtaccacagcacttcagcctgagtgacagggagagaccttgactctctctcttttttttttttttctgagacgtagtcttgctccgttgcccaggctggagtggagtggcgtgatcttggcttactgcaacctccgcctcccgggttcaagtgattctcctgcctcggcctcccgagtaagctgggattacgggcacccaccaccacgcctggctaatttttgtattttattttttagtagagacagggtttcaccaggttggccaggctggtctcgaactcctgaccacgtgatccaccctcgacctcccaaagtgctgggattacaggtgtgagcccccacacctggctgagaccttgtctcttaaaaaaataaaataaaaaggctttacatttcttttcacatgtttgaaagttgtttgtatttttattttctagtgaacagtgtgcctatgtcctttgtgacatttctctattgttttttctgattggcgtgcagtagactcacttcctcagatccccagtaggcagtgtcagcatcttgtgctgatgtctgtcagttttaaccgttcaggaactccgtactccccgttgggaatctgcagctctgatttccaaaatcacaaataagttttgtgttcctctttcaggatgccgaggaatgtgacagggctgggagtgtggccacctgccaggccgtcatgcgtgccgtgattgggattgggattgaggaggaagatcggaagcatacctggatggaggatgctgacagtgtgagttggcaacaggggcctttgtccgtaatatggagtctctgcttgtgggaacagcaggcaccttataaactactaggctattttaaaactctttttttttttttttaaatctgagacggggtcttgctctgtcgcccaggctggagtgcagtggcgctatctcagctcactacaacctccacctcctgggttcacgccattctcctgcctcagcctcccgagtagctgggactacaggcatgtgccaccacgcccagctaattttttgtatttttagtagagacggggtttcaccgtgttagccaggatggtcttaatctcctgacctcgtgatccaccccgccttggcttcccaaagtgctgggatcacaggcgtgagccaccgcgcccggcctcccagagtgctgggatcacaggcgtgagccgccatgcctggcctcccaaagtgctgggatcacaggcgtgagccaccgcgcccggcctcccagagtgctgggatcacaggcgtgagccaccgcgcccggcctcccagagtgctgggatcacaggcgtgagccgccgcgcccggcctcccagagtgctgggatcacaggcgtgagccgccctgcccggcctcccagagtgctgggatcacaggcgtgagccgccgcgcccggcctcccagagtgctgggatcacaggcgtgagccgccgcgcccggcctcccacggtgctgggatcacaggcgtgagctgccgcgcccggcctcccacggtgctgggatcacaggcatgagccgccgcgcccggcctcccagagtgctgggatcacaggcgtgaggcgccacgcctggccgcagatttgctttcttactctgttcgctctcatgcacttacctcttatttttttttctggaactgtttgacaatgaatgagttgcagatgtggtgccctttaccttaaacactttggtgtgtatttctttaaaagaggacgttctcttacacagccatagctcagttatcaaaatcaggacattgatgttgggacagtgctgtcaggtaacttcagaccttactcaaatctcacccacaggctgggcatggggctgacgcctgtaattccagcactttgggaggccgagatgggcagatcgcttgagctcgggagtttgaaaccagcctgggcaacatggcagaacaccatctttacagaaacaaaagccaggcatggtggtgcacgcttgtagtcccagctactcaggaggctgaggtgggaggatcacttgagctcaggagtttggggccgtagtgagctgtgattgcgccactgcacttcagcctgagtgacagcaagaccctatctcaaaaaaagaaaaagtctcacccgttgtctctgtgtccttttagcagaagaaaaaaccaactgtcttctgtgaggaatacagggtcatcctcaggctagtctggaagagagcctcagcctttgttgttcctgagtgtgaattttttgaggaccacgggccagtgatgctgtagactcctctttcatctggttctctgtggtgtctcctccgggttgggttgaggcttcttggtgcatcatacggagaggtgtgcacctgttcaactccgaccgtctggtgcgggcagtggccgcaggtgtttccactgtatggttgctgtttgtttctttgttattattaataagtattttgaggatccattaatgatgcttcttggcctgaatcagttatttctgtggtgtttgctaaatggtgattttttttaaatctttttttatatattaaattttttttgtagaaacagtatctcactatgttgtccaggctggtttcgaactcctggcctcaagtgatcccacctcagcctcccaaagtatgtaggattacaggcgtgtcactgtgcctggtcacacctgcataatgattttgtgaacagtttctcttacattttattagttggaattctacagtaacgaagagcttcactttctccttcatccgtgtgcgttcacttccttccatctggattggtcaatggctcctcctttggtccttggaatcagaccccactgctggcattgaccgtgtgatacacacatgattcttttgcaccccgtgtggcgtgacccagagcttgtgtgccggctgggccatcctcctgccccatgtatgctaaaatacacacatcaatccttaggtgagttaagacgcagggcagcggtaatagtttttgttgttggttttttttttttttttttttgggacagagtctcactctgtctcctaggctggatggagtccagtggcacgatcttggctcactgcaacctccgcctcccaggttcaagggttcaagcaattctcctgcctcagcctcctgagtagctgggactacaggtgcctgccaccacacctggctaatttttatattttttatagagatgaggtttcgccatgttggccaggctggtctcgaactcctgacttcaggccatccacctgcctcagcctcccagagccactgctcctggcctgtttttctcttattattttgtcatctctttcacatacactggagtaagcacagctgtttttcaaagtgctcgtgatgctagagtaaggaggacagtgttttctgtgcccagaagtgtgctgtggtgctgcttccctcccggacaccagggccctgggcacagcatcacttgatcctgtgggtgttcaggccactctcgggttgcttgtgaaggtccaaggaggcgatggagaatctgaaatgctttgtcaccaaccctcaggacttggatcagaaatcacagagaggggcatagaccagagtgctctatccagggcctgaccctcaccggcatcctccctgaccccctcagatgctcctggtcaggacacagtgcctgaggcagggcccttgctggtttctgtgctggttgagtcagactgaagccatgtgacttgggaggcatcaggtctgagtgaagaaatctcagtgacatccccactcctcgtcctcctgacccattttcatgctggggctccttaactgggaggctcactgttgtcccttcctctcgtagaaggcagctgttcctctgggaactgttcttgggtgcccctgtgtggggacttggacagctttgagctgccagtccagatctttgccattgtcatgttcatagttgcaaaactttgttcctgacccacttcctggtggcctctcacttaccttcagcaacaaactccttcttggtacaagaatcctttcagcggccgggcgcagtggctcatgcctggaatcccagcacttttgggaggccgaggtgggtggatcacttgaggtcaggagttcgagaccagcctggccaacatggtgaaacctcgtctctactaaaaatacagaaattagctgggtgtggtggcaggcgcttgtaatcccagctacttgggaggctgaggcaggagaactgcttgaacctgggaggtggaggtttcagggagctgagatcgcgccactgcactccagcctgggtgacaaagcgagactctgtctttaaaaaaaaatcctttcagcatctgcagggcgcagaggacggtgacttgcccctgtgtgaggctgagtgggaacaggtgtctgaacctggcccagtgagtctccaggtgtcatgatcgccagtcagacgaacccccagaggctttagcgctgcaaatggtgactggcttttttgttttcttttgttgttgatgctaaccaaaagataaagtcattcttgagtatagggaaaaaaaagcctgaagaaaatagaactgtgtttactgtagttctgttgagtggatgggttttttcctgtttgtattcacttgtcttttacaggtttctaattaatgtaactttttatcgtggtaaatatatactatacctaatttttttttttttttttttgagacaaggtctctctctgtcgcccaggctggagcgcaatggcgcaatcttggcaccctgcaacctccgcctcctgggttcaagcaattttcatgcctcagcctcccaagtagctgggattacagccatgcactaccatgcccagctagtttttgtatttttagtagagacagggttttaccatgttggtcaggctgatctcaaactcctgacttcaggtgatccacccagcttggcctcccagggtgctggaattacaggcgtgagccaccgctgtagccactatacctgatttttaaaaaagaaaccaatatgtttgatctgcagttacagcatgtgtgtgtgtgtgtacacgtacatatgcctgggccacagccctctgtgtgtgtgtgcacttgtatgtgcatatggctcggccacagccccatgtctgtgtgtgcgtgtgtgcgtgcacgtatgcctatgccttggccacagccccgtgcgtgtgtgtgtgtgtgtgtgcatgtatgcatatgcctcagccacagccgtgtgtctgtgtgtgtgtgcgtgtgcatgtgtgtgcatgtatgtatatgcctgagccacagccctgtgtctgtgtgtgcgtgtgtgtgcacgtatgcatattcctcggccacagcccccgtgcatgtgtgtgcatgtatgcgtatgcctcagccacagccctgtgtctgtgtgtgtgcatgtatgcatatgcctcagccacagccccgtgtctgtgtgtgtgtgtctgtgtgtgtgtgtgcacatatgcatatgcctcagccacagccccatgtctgtgtgtgcgtgtgtttgtgtgtgtgcgtgcacatatgcatatgcctcagccacagccccgtgtctgtgtgtgcgtgtgtgtgcacgtatgcatatgcctcagccacagccccgtgtgtgtgcgtgtgtgtgtgtgcacgtatgcatatgcctcggccacagccctgtgtgtgtgcgtgtgtatgcgtgcacgtatgcatatgcctcggccacagccctgtgtgtgtgcgtgtgtatgcgtgcatgtatgcatgtgcctcggccacagccccgtgtctgtgtgtgtgtgtgtgtgcacgtatgcatatgcctcagccacagccgtgtgtgtgcgtgtgtgtgtgtgtgcacgtatgcatatgcctcggccacagccctgtgtgtgtgtgtgtgtgtgtgtgtgtgcatgcacgtatgcatatgcctcagccacagccctgtgtgtgcatgtgtgtgcacacctccatcacctgcagctagtgacttgtgcacctctcgcaggccaaggaagcagcaagcagccccatgtgcccctttttcagtgttcttgtttcttgtcctcatcctcaggcttgtctctttcatgtacactggagtaagcacagctgtttttcaaagtgcttgtaatgctggagtaagaactacagtgttttctgtgcccagaagtaggtttcccagtcctggattgtggttctactttctttctggagggggaggacagagtgtgactctgtcgcccaggctggagtgcagtggcgtgatctcggctcactgcaacctttgccttctgggttcaagtgaatctcctgcctcagactgccgaatagccgggattacaggcgcatgccaccacgtctggttaatttttgtatttttagtagagataggttttcactatgtaagttaggctggtctcgaactcctgacttcagatgatccacccgcctcggcctcccaaagtgctgagattacaggcgtgagccaccgcacctggcctggattgtggttctaattagataaaacactgtggtacaccttctagcagatatcatctttcagaatcgtatgagcctggggagggcatcatgccacttgttctgtggccagtgctgggctgcccattctcatgtctctctctgctctagtgtgtagcccacaatgccctggagtgtgcacgagccatctacgcctacgccctgcaggtgttccccagcaagaagagtgtgtggctgcgcgccgcgtacttcgagaagaaccatggcactcggtatgtggtgggacccgcctgcccaagggtgctaatgaaacctccagctccatttgtgtagccctgaatttaaacctctcatgtctgctcatccagtcttgtgcccatttgaggtctggccctctggttgtgatgaaggattttatggcatttgggactttgcaactggatccatctttatagccccttctgggacagcaatgataccattttctagctgagaaacaaggaaccccgggggcccgtcctgctaagtgtcctgtagcctgaggagtggcctgggtatagacttgaggctggagcccgcgtggcccatggccgagcactggctgcagcggtgggtggggcagcatctgggctcaggcaggcatattttccatttaagctgtgctggctttgggttttgactggtttttgtgctcagaggaggtccttgacaattttatttaactgcactctttaattgaaaacatctttcaggtccgctttattggctgtaaatgctgattaaatttggcgttgcagtttattgttttaaatggatagctctcaagggcattgggctcgtgtccccacgcaccctctgtccgtcctctcccaggtcctcgggtgatgctccctgtaccaggtgaggacaggccctgctggtttcactggggctacagctgagaatgttgagccattgtctctttgcttttctggtgtgatttaatctcagcctcttcagggtgtctttccatgtgtcctcctgaagacctggccccctccccatgcccaccagctggtctgtgtttgggagtgatctcctttggggacgttttgaaatggctgccatggtgcccctctgtagaaggtcacctggggcagtctgagtgaagaacagggcggtgccaggtgtaggctgaggtctctcggcccgtgacctgaatatgaactgctgcccttgacccctgggcacagtgggcagtgccctccgacttccctgccttctcccgagtgcatgcttgcagggatgaggagaggcagtagtgctgggggagctggtcctctggagagcacggttgctttgctggcccttgctccacacagtgtgattgtgtgtggtcactttgtcttgctgtcgcactcactgaggcccaaaggggtcattgatgtgactgagggtggtgggccacatgagagtccaggagcatcagacctgatgcccacggctggcagttttgctcaatagtgacctgaaatcactttcttcctataagataattcttttggatgccgggagagtgaacctgggatcataatctttatcagtgggtccggggtgcgcttgtgctctgtggttcaagatgaaaaggcctcccctgtcacagactgaggttattgctgcttccaggacacacggctgtaaaaggttctcttgtgaagttcgtctctccagctctgctatttaaacaatgcattcctttgtagaaccctcttcagtagttgattttagaacctttatggagaggaaagatttccccacactctccccattgtaaaatctggtcaatcatttatagcatcgaactttggagcagtaactgtctttctggcgtgcccacgccatggctgagtgtgatgtgtgttctggtttatggccctgcctctggtgaccgtggcctcttatcttgcagggagtccctggaagcactcctgcagagggctgtggcccactgccccaaagcagaggtgctgtggctcatgggcgccaagtccaagtggctggcaggggatgtgcctgcagcaaggagcatcctggccctggccttccaggtgggtgagggttgcctgtgtggtgaggggcctgtgcacacaggagctgacctgggtgctgactggggcctgaaaatctcccacatacaatgtggcacgtgctgttgttggggtgcactggagtccaggggctgctccacaggagcaggggccgtgaaggggcccgagagcaggaaagcagcccacctggcagatacttacctctcggtccccccactcagtgtgaccacgggtaaatgtttcagaacatggaacacggggtcacacaggctgagggcgcccttatgtgaatggatgtattcagaccgcctcactgagccaggcctgagggtgcctggttgtcatgaggggggtgtgtgttttttttaagtaccttgtctttattttcacatataacatcctaatagtttataacatactttttaataagctatagaatgctatataaaagtctgttactgtagctcaggctaatatcatagagtgtgcccttctttgagcaaataccatgagaggggactggcctgggtttaacctttcgctctcagctgcctgtttgagatggcatcactcctgtgagtaactgcagcgtcccctccacctgcccgctctctgcctgtcacgtggcttccttccacccgctctcttgggcggctgtgctgattgggacgcattcagacagccctgggcaccgggctggggaggctttgagggcagagcctgcgtgtccactgggctctgggctgtgtgagcttccgtggcttgtggacgccttctccacatgtcagtggcaccctgggagtcctctctcctgcccatgtgggctcatgaggacaggacagctggcttcccttcatcaagctcaggggaaagagcgaggttgcgtgtgatgagtctaccagtataggatgcgagtgccccattcaggggctttgagagggcgtgggtggatcctgggtaagatggccctgcacctgcccccgttattgctcgagtgctttagcagcctcttcactgtcctcactgtaccagagtgaacatgggcctgtgtgtttccaggtgagtctggattcttgcactggagtcggctctgtcatctcctccctgggaagggcttggaccagactaatcctgtagcagagcaaggcctggctcagttcctgcctgcctgcttttgattaagtgtgatcaggcgctggtccctgtgttctgacccctcttgacgctgctgtacttgcccttcaggccaaccccaacagtgaggagatctggctggcagccgtgaagctggagtccgagaatgatgagtacgagcgggcccggaggctgctggccaaggcgcggagcagtgcccccaccgcccgggtacgcagtggcaggcagggctgggccgtctggggtgcatggtgtgcacatgcgggccccacgcctggcttgggtggtgatgggagtgagatgacggcaggcaaacgagaccacagcacactcatctttgtgatgtgactaaaacattcatgtggccgggcgtggtggccgggcgcggtggctcacgcctgtaatctcagcactttgggaggccaaggcggacagatcacctgagggtgggagtttgagaccagcctgaccaacatggagaaaccccgtctctactaaaaatacaaaattagccgggcgtggtggtgcgtgcctgtaatcccagctgctcgggaggctgaggcaggagaatcgcttgaaccccgggggtggaggttgcggtgagctgagatcgcgccactgcactccagcctgggcagcaagagggaaactgtctcagcaacaacaacaacaacaaacatgttcatacggccgggtgtggtggctcacgcctgtaatcccagcactttgggaggccaaggcaggtagattgtgagatcaggagttcgacaccagcctgaccaactctgctaaaaatacaaaattagctgggtgtggtggcttgcacctgtagttccagctacttgggaggctgaggcaggagaatggtgtgaacccagcaggtggagcttgcagtgagccgagatcgtgccactgcactccagcctgggtgacagagcgagactctatctcaaaaaaaaacaaaacaaaacaaaaacatatatttatccccaccttttgtgtacacaaacaggctatgaaaagcttacaaaagtacacacagtactgcaggtaacagtgttgaggatgagtgtaccatgaagcacgtaccctggagctgatgccctgcgtgacagtgcatgtctgccccacaggtgttcatgaagtctgtgaagctggagtgggtgcaagacaacatcagggcagcccaagatctgtgcgaggaggccctgcggcactatgaggacttccccaagctgtggatgatgaaggggcagatcgaggagcagaaggagatgatggagaaggcgcgggaagcctataaccagggggtacgtctctgcctgcaccctggggctgcagctgacccggcattcacaaaactgagccccctggtgcagggtcattgcccttcgcctctgaggagatgtggagggctgggggttacagctgatggagctgcagactcaggacccaaaccctggtcccctcgctgagttctgtgcttttccttatatgaagctgcacacactgctcagaagtgcagagtgtggcacacctgcagtaaaggctggtacgtacagacctgtgtgcacaggtccacagcaccaccgcacacctgtacacccacaaatgcagagtgtgaggggtgtttttccatggacatggcagccctgagggactcggtcacccactgcagatgagaagctgggcatggctgtgtcccagttcttcatagacaccacctgagctgctctcttacttgttggttgcagttgaagaagtgtccccactccacacccctgtggcttttgctctctcggctggaggagaagattgggcagcttactcgagcacgggccattttggaaaagtctcgtctgaagaacccaaagaaccctgggctgtggtgagtcctggagggggcagcctggcctctgggcacagcttccccatcaggtgggccgccgtcacccagctgcttgtgtggagtcactcgtgcagtgcttccaggctcaggggcttggggggcggtaggtgctggccatgaaaaatcacggtccctgccttaggagagttcggcctaggtactgtgacaggcctgtagatggtttgatgcagtttaatttgtgttctgatggagggcgcctgggagagggaggggttaatgatggctgggacgagggaaggatggaccccggagagccagctccacagaggaggtggcgtggagagccctggaggtggacaggagcctgctaggtgcaggctctgttcatggaggtgctgcgtccagctcagggtgacggggctggagcactgtgcaggcactgccgcagacaggcagcttctgggtgccttgtgcggccctggctctcccagtctggtcttgtttgttctggatgccttcacctgcatctggacagcgtcaggatctgaggtcttgccttggggcggttgccagtggggctggcagggatgtgggccccagcgccttgtttctgtggtggatgagctctgctgtggagggaatggagtttttgctgctgtgactgggtggagagccctttcagacaaggcttcccagaagctaccagaatatgtgctgttggtagacggctgtgggacctccgggggcctgtctcctcaggttggagtccgtgcggctggagtaccgtgcggggctgaagaacatcgcaaatacactcatggccaaggcgctgcaggagtgccccaactccggtaagggggtgccccgactccggtaagggggtgccctgactccggtaagggggtgccttgactccggtaagggggtgcttcctggcttcccagactccgcagggctggcacttcctgagggagtgggggctcaggcttcagacggactttattaaaatgtgtagtttgtgtgaatcatttcagtcaaaagtttcagctatactcggccgttaagacaacttaatgaaattcttggcctcaaaatgggagaatttgatttcatttctgaagtgttatcatttctttttcttttaaaatttaaaagaaattggccaggtgtggtggctcatgcctgtaatctcagcactttgagagactgaggcgggaggattgcttgagtccaggagtccattgcttgagaccagcctggccaacatggtgaaaccccgtctctactaaaatacaaaaatgagctgggcatggtggcgggcgcctgtaatcccagctactcgggaggctgaggcaggagaattgcttgagcccgggagtgggaggttgcagtgagctgagattgcgccattgcactccaccctgaatgacagagtgagactctgcagggtgtccagtctgtgccctcagggctgccatggttttgggtgggccagagtgctcatcctttgtggttctccttgcacaagttctgcgagccgtgtgtgggaggcccctgtcgtggtctgaggacgtcccgggttagaatctgtaggctgggcacctttccggaaccagaggctggagtgcaaatctttgttctttgtttctgaattataggtatcctgtggtctgaggccatcttcctcgaggcaaggccccagaggaggaccaagagcgtggatgccctgaagaagtgtgagcatgacccccatgtgctcctggccgtggccaagtgagtggggcccccacaggattgctgaacctcggggtcctaatgggctctttttccagagtctgtctgcctcttcctggtcattgtaaagatgcccggcagcagggtgggcttccccgatcctcggctgccgtcgctcctgctgtggtctggggcaggcgcctctcctggcagacacacctgagggtgccgtggtcagagactcactggggacgcatgtgattcacactggtgcgctggccgccgggtcacagactcactggggacgcgtgtgattcacactggtgcgctggccgccaggtcagagactcaccggggacgcatgtgattcacactggtgctctggtcgccgggtcagagactcactggggacgcatgtgattcacactggtgcgctggccgccgggtcagagactcactggggacacatgtgattcacactggtgtgctggccgccgggtcagagactcactggggacgcgtgtgattcacactggtgcgctggccgctgggtcagagactcactggggacgtgactctggaaccttgcaggcagcagcgggtagccatggggcagagcatgcagactctaggcacatgtgggcaaagacccgccaggtgtggggcacagcagggagctcagggccatccccgacccccagggtccctgtttccttctagaaagaggatgacagtctgggaaggagctgggcctgagtgtgggtcaggaggctgggaagtgaccatgtggggtgaagggagttcttggaagaaccctgggttcctgaggctgcagctcaggacgtgggctcacctggcagaggtggcgtgtctggccccaggagctctcctgtgtccggcttcccctccacctgccccgccatgggtcatgcagagacaacagccttcctagtgctggcttttgattctctccatcccttctccccagcactgggtggcagtggtgcttggtctccagaggtctgggtgccgcccccacaggcttgcctgtaggggcacctcctctcccctgcccgcaggcccccgacagatgagagaggctccccacagggaggcttgtgtctgcctggtgctaccttggtcctgccctgtgcgttcacctcccagagtgacttctgggtgacactctgatagtgcagccataaaaccttataaaaggctttgctaaagtaaataagtcactccttgctattcccaagccagtgttttgtgtgtctgctatctgggtttgtgctctttaaatcacagtttatctaacaccgggcaattaagaataccacaaggcttaaaaaacaatcaggttatcagagtgtgaaattattccgtttggcaactgagacgaacccgaacagctgcccggagtggaggctcctcgtgttgtctcttgactacggtgcctctggctccagggggaggtgaccctgaggagagggtggcagcaacgcagagtcccgggcctgccagcatgctcagcagccagcgcccgccatcccttctccagcagcgggtgggggtgccatgcacacccttacctggcctctcatagcatggacctcttcgggcccggtttttcaggtgtgcatgtgtctggcaggcacggcggtgtgaatccagtggcctgagggctgtgggctgcaggcccaggcccttgtgctgcctggagcccatcttctcagtgttcactggggttgctgctggaggccgggtggggcaggatgatccagcaggtgtctcagtgaggagctgaaactgtataactttccctcatcaaagttgcagtttaattttgtgtcaggtttagtttcatctccttgtatctgaccctaattttacggagttggaagatctttccctgcgtgtgaattttttaagaaacagtttgggacaggtgcggtggctcatgcctataatcccagcactgggaggctgaggcaggtggatcatgaggtcaggagtttgagaccaccctgaccaacacagtgaaaccccatctctactaaaaatacaaaaattagccgggtgtggtggcgcatgcctgtaatcccagctactcaggaggctgaggcaggagaatcgcttgaacctgggaggcagagcttgcagtgagtcgagatcgcgccactgcactccagcctgggcgacagagcgagactccttctcaaaaaaaaaaaaaaaaaaacaacaaaaaaaaaccaatttggttagacccgtgaagggcagcttcaagttaatgatctggggtaattatttctggatcagccgaggccctgatcctcaggccttcttgaggggagcaccagggctgcgggtcagggatgaagctgatggccctgaagccgttcccctgccccagaataccgtcctgcagccactcactctgggttcacgtccttctgctggaacaggctgttttggagtcagcggaagatcaccaaggccagggagtggttccaccgcactgtgaagattgactcggacctgggggatgcctgggccttcttctacaagtttgagctgcagcatggcactgaggtgaggcccctcgacagaccgccgctcagtgccttctgggactgtggcggggagttccgccagccctgggggctctaggaggtggccacggccagcgtgactctgcccggggtcgggaggatggaccgggtgtgtggggcacagaatcctcgacacctccccacaaggcagtctctgcctccacatccgttttctggttatagcctcacagctccacaccctggaattgaggcaccctgtccgttagggtggcctgtctgctggagtattttaacgagttatttgctggctggagcctgggctcactttaggaatgggaatggagttggcctttttcttgggcctgagcctgagtgtggctttctaggacagcctgggcagcagcccctctgctcccacccgccccgctagagccaagcgttgtctgagctgtgctggaggcagtcaggctgtcctggtcctccctggaaagtgttgccagcccacgtgaaccctaactccttgtttggagaaggcagacgtgagcacttgtgtgaggcacagacatggggagcctggctcagttcctcatctgtgggctgaggctggtggggtccatgctcctcaggaggtggggctcctttgaggaacacacctgaaagagccttgccttccggtgcagggcctgtgccctctggcccgccagttggggttggtgctgccagggccaggtctgcaggggccaggcgagaagcaggcgaggtccggggagtagcgtgggaggacccctgcctgacgtgccctgtggtccccccaggagcagcaggaggaggtgaggaagcgctgtgagagtgcagagcctcggcatggggagctgtggtgcgccgtgtccaaggacatcgccaactggcagaagaagatcggggacatccttaggctggtggccggccgcatcaagaacaccttctgattgagcggttgccatggccggtctccgtggggcagggttgggccgcatgtggaagggctctgagctgtgtcctccttcattaaaagtttttatgtctcgtgtcagaacaggcagcctgctggttttctctggggcccttctctggctcctgcttctgctgccccagtctggcctgtcctggcctgtcccatgccgtcctggggtggctgtgatcgcccttgcttggacagaagcctcttgcagacagccggtgtctcacagaggaggcactgtggaggtgcccgggttccccaagactgtggagaaggtggtaggggtgcagatgttctggccaaaagccctgtgaggacagctggagacagtggggaccaagctgcatgcaggacgcaggtgctcgcaggagcctggcagccgcctgcaagggtcttggtcaggggacagctggggcctccctggggtctgagtgcaaacaggagaacccagctctgcgcagggcctctccacacagcctcccgggcccctcaggcatgtgctgagtgacagtgtcaccagtaagaggcgttctttcttttggaggtgagttcatttttttatttttgagacagtctcgctctgtcgcccaggctggagtgcagtggcacgatctcggctcactgcaacctctgcctcctgggttcaagcaattctcctgtctcagcctcccgagtagctgggactacaggcgcccgctgccaaactcctgacctcaggtgatccatctgcctcagcttcccaaagtgctgggattacaggcgtgagccaccgcacccggccgtgagtttatctttgctaatttatcattcgcagtttaaccctaaagcccttgtaatggttctcatctccaggttgaacagtgatggttctcatctctaggttgaacgttgatcacccgagagacttggcttctcttcagccttagctgtgtaaggataaaggacgtcctcaggcctgggatcatgtgtgtgcattcagttgggagccagctggttcttgtgtaggccggggctagagacatctggctggaggtcatggctggcccagagggtgtgggtggacagtcgttgaggccagcgggcggggaggagggcgctgtcatgtgggctgaggaggctgctggagagcagctgtccctggatgttccttgtgagaggggagccctggagggtcccggcctgtcttgtggtaccgatggcagggcctgtggtggtggtcagtcactgacccacagctctgcccacctgcacatgggggcctgtgctaggccttgtggtctgcctgccctgctcctgacgagtgagaatggctggggtgggagatccctgcctgcacgtggggcggtcctggtagaccagaatgtgggtgtgggtcccccttccctgtggttctggggaccttgaggacatggtcaatcccgggcaagggacctgccacccctgtatggggtcaggaactgctggttggtctctgctgggcaggcaacctggggtccagctcaaatcgttggaatgtggaagtccttcctctcgccccgtcctgaggagcagctgcaggagcttcatgagtgttttcactggaacttgtggaggagtttcctttgatccctcatggagagacggaagcatgagggagccctcaacatttattctgaagatgaagagagtcctgcagctttttggagtttgtgaagtcagcccggccctgtacagatgtggaaaccgaggcccaggaagtttgtgagccagcccggccctgtacaggtgtggaaaccgaggcccaggaagtttgtgagccagcccggccctgtacagatgtggaaaccgaggcccaggaagtttgtgagccagcctggccctgtacagatgtggaaaccgaggcgtaggaaggaagcccttctctgacctcagagctgaaatggccagtgctgggtgggcattgaggggtcacacagaaaagaatgtttcaggccatgttcaggggatacttcctgcagggcccttggaaagttccggagcgcttacattgtccatgtgtgagtgtctcctctttcttgcctgtgtggggttttctc

SEQ ID NO: 774 - DNA, 202073 bp, Homo sapiens
aacccaggaggtggaggttgcagtgagccaagatcgcgccactgcactccagcctggacgacagagtgagactccatcccaaaaaataaatacataaacaaaaatcttattgatgtactaagtgttgttaatgattactagttgaaaaaacaaaattttaagttttgttgtcactggttaatttaacaatgacatgtgttcatagcaaaaactctaatagtatatgtacttcaataaaagtttatttcaagtattcaaacaatataaaaggtcatacaaggccttgtatcctaatttccagaggtacttactgttaaaaattacttgtataacttttccagaaatgttctcttctctttgattttatagacatttagtcatactgcaatactgttgagaaacttgcaccttctccttaataatacaccttgggtctctttccctagcagtgcatacagacctacctccttctttttcagggttacattgtactcttttgtagtagagaccatcttttgtaaggccacccttctgtgcagcactttggttgtttctagtttttgctattatgaacaatgccacaataaactcccttgtccatgtagctttgattattgctacaaataaaccgagagtataaattcctaggaggataattgctgagtcagtttcccttgttgcaattttagtagttccaatttgggccaggaaccatggctcatgcctgtaatcccagcactttgggaggctgaggtgggcgaatcacctgaggtcgggagttcaacaccagcctgaccaacatggagaaaccccgtctctactaaaagtacaaaattagccgggtgtggtggcgcatgcctgtaatcccagctacttgggaggctgaggcaggagaatcacttgagcccaggaggtggaggttgcggtgagccgagatagcgccattgcactccagcctgggcaacaagagcgaaactctgtctcaaaaaaaaaaaaaaaaaagttacaattcacttccaaagagttgctgcaactgacacctatagtatatgagaatgtctgtgtcatcaaactttacaaagtaaactgttgttaaaaaataacagtgatagtatacatatgctgaacagccacacatacaaatcagctcatctgcagagatgaatgctcacaatcaactgagaggtaagctattatatttcccctttgaagaggggacagaaggtcacagtgattcagagcagggtctgaatctcagctctgctatttattattccagtgactttgggcaggttcttcgagtttctccaaaatggtgatattaaatgaaataaggtttgagaaaactcctagagccagtgcctggattatttattaacatcatgggacaagccagagtgccagagtccccagtaagtttgagaatgaccctagtataatagagacttgggttgtatttccacccttttctaccacctcccaccaggttgcatcatttctttgaattttcttatttgtaagggtcagtttagatatttcctattaattgaccgatgtgaaaagatatgagtagcagagttgcatcacaatgcaggtggcattttatattcacagcagcatcacagcaaaagaagacaggtaagatctcagttccacttctgtcactgagatagtgtagagagtgggtgagctttggggacagaccaacctacctgcagtcttgcttctttctggctcttaagagctgggtgaccttgagcaaattcttgtagctatctgagcttcagttttcttaattatgaaacatagttaacagttgctactcatggggttattgtgaatataaagtaagataaactatgaaaatacttagcagcttgttaaatattcaacgtatgcacaaacagcaataacctcaccacgtgactgtagttcacttgtaggtcaaggagggacaggatgcttctgtggagaggaacaaagagagatgttaccagtcctcacctctcagtcacactcccatttgtcaagtcaggtgactcacacagcatttgtctggcttctctcactgtgaagcgcacgcttgggggaggggagtgatgagagcccaggggcagatcaaagcaagggctgcagcctcagctatggctctttatgctttttcattcctccgggagagaagtgagaaacatttagaaatatttatcattgcaacttttgaatatactttatgtttgacttgcaaaatggaatgcttgttcaatgtcatcctggaaaacattttgtgggatctgaagaaggtcatgaactacctctaggtttttgctgtcgtcttgccctctcccttcaaatctgttctaagttcagttattatgtaacatgtcggttgcaaatattaagctataatcatggagatggcatttctgaaaaacaactgtgaatcgttcattttttcccatttttttaattttgaaaatttcaaatttacagaaaggatgcaaaaaaagcccaatgaatatctagatttatccattgtttcttattttatcacatatgctaggatattatttttgagattcagacagcttcattcatataacatggtcctcttttttttttgccaataaaaatgtaatgggaatagactcacttatatcgatgttgtgacttccaggctctcagctttctggggtttgagatctattgtattaatatttggctatatggttggaatataaagagtcatgtttgtagtaagtgccagattgaacatcttatgcacaaagtatacaagagacattatctctaaccctaacagagactctccaagccagggtctcatcaattccgatttacatatttggtaactgacactcagagaggttgaattactccactggtaaattacagagtctggactcaaaaacaggtccttttgatcacaaagctctttccatccaggttttggaggattctgagaaaaagacttccgtacaaacatagaaaaacttttatttctgggagagttgcaatgttaattttaagtaatttcctttcactaaggaagtctgggggtgggaatatggggtggaagatggagatttaaggaaaccacggttaggaatttagtgatagaaactgaagatgataacgattcagagaatggacttggttcttacagcctcttactagccgtggatcctcccgacagatcaccctaatgcctccacatttgtgaaatgggaaaaacaatcaacacctctttaccaggtgttttttttttttcttgtcagctgcattaaggagaagggggaaagagtagaacaaggagttctatgtgtaacgaacggaacaatctattgagctaactacctaccttcggaccagcctacctgtttcatgtttttgttttgtttgttttgtttttgtttgttttggtgaggctcaattttgcgaactgtggcaaactgatctttatgaatacgaggaattgatagtgtcattttatattagaggagggagagaggaagataaaaaagggagagggaaggaaggagagagaaagagagaatgatggcagaaatcaacggaggcggaggcgtagtttcctgaggctagaaactcagtctggggagacatgaaagcgtcttttggggaattcaagtagttgctaggtctcagggaatccatcttcagaattttcctccgcgtggttgcgggaggaaaatgagttgagtggagaccctgagcaaactcctctccaggccatgcggcatcctgggctctggtttcccaggcacgcaaggcacgcttttctctacttcccggggacgctggcctcaggacttagaactcctgtatgccggacagccggtaaggtctactgggcggccgctttctctggtctttctctgctccgtagacatttctgtgtcaggtgcctcgcatattcgcacccacgcgccagggcattaagccgaaccttgcttggtggctctcagccttgaaaggccgcaggatgtccgcgtccacagctgtgaaccggtgagtgcaggtggacgggcgcacgcgggcgccagggtaattaacagggcttcagagggcgtgacggtgaccgtacgttgtcggcgaactctcttttcatcctttacatttccacggagatttggccaataaataacaagaataaaatgtacgcatggttttgtctttgcgctcgtggggtcgtggcggggtcttttaagtgaagagaaaaagaaaccagaaacccacggtggccccaccggctgcttccggggacacctgaaatcagcagctggaactgacaatttggagagccccggggatggtcatctgagacctgggttacaatacaagtctgacctcggggcgagtccaggctttcttcccctcagggtcgggtgcctcaagagccagtggcgctggccgggctccagccgcgagcagatgccaggcccggcacactttgcacgggcgatgcgcgcggacgtcccgggcgcgctcggtccgcccggcttggcaggagctgcgagaggccgcgcgcaccgtccccagggacagccggaggactcagggctcccgggtggagcgagagcgcggcggccgaccgcgggctgcgtgtgtcgccttcctcacgcggtatgctgcgccgtggaacgctgggctacggaccctgagggtgcactgtggcgggtggcgtacgccgcgctccctccccgcttcctgcgcccagggtcggcgggcagagttcctgggtccagcttggcgctgagcagcccccggccgcagagcagctcccgccggtcgggagacgccccctggcccccgcccccgcgtggccggccgggacgagctggagcagcgggaggaggcggcgccgccaggactgcctcctccccgcccctcgcgtctcctccccgcgccaccgggaaggacaaggggactgggcacggggaccccggccagtgagcgcccgtggcccgggaccgcccctcccttgagctctctcgccgcgatcccgggcgggtctcgccccgcatggtgctggcagcagccatgagccaggacgcggaccccagcggtccggagcagccggacagagttgcctgcagtgtgcctggtgcccgggcgtccccggcaccctccggcccgcgagggatgcagcagccgccgccgccgccccagccaccgcccccgccccaagccggcctaccccagatcatccaaaagtaagaagggagaagggaacagggaccacgggtgcgcctggggacacgccccgagagccccctttgtggcttcatttcccgtccctgctgaacttcgctcgccccccttgggtttgaagttttctcgtaccccctctgggcagagtcggtgtccttctggctgtttgttaggctggaaagaggggagccaagttctttagggaaaattattttgtttttccttatctcctttctcttctcttcaggaatggtactagatattttgaactaaaatagctcagattggggggaaatggcccagcgactgtatttcatctttctggtcccaagaggacgctggaatggagagtcgtgcgtgagtgtgtgcgcgcgcgtgagggtgtgtaagtaaaatgccaaaaattaaaccacccttcatggtgcccctgaaaccaaccagtggaaagggaggtgacagtttgtaaacaacatgttttactttgccctgaaagtgtagacacttttcaagaaggccttttcgaagagtttagctacgcaaccgttttccattaatgttaccatcttgtgactcgggtgacctgtgcgacttgggtcgtgaattctcaggtcggccttcccaatgcttgagaaggttgggggtggttaataagccccgagaggctctttcagcccgtttgaggaacatacaagtaaaaacagtgatgctttgtattgtttgttcttttgagatttcgtgtgaccgtttaaggcctagaatgttggtttatttgaaggatctctgctctcctaagggtttacccagtttgtaatgaagtcttcaaaactagtttaataagtgtaggaaagtgaatgatgcgcacctctgcgaaactgacaacactaaataaatacacgcaagtacagcaaaatttacccttatggaacacagcagaggttttctgctgctccgctgatgctttgagtcctgtaaatttaataaaacttagtaacagaaagaaccagtgatgggtgtaaatggaagtaaatagcagttaagtatttattgttttgaagactgatttatctaatagaaagaattgtgaaaattcaagtttaacattagaaaacgctggtatcatatttcagaacaaaatggttccctatgttgactggtggaatactgagtctccacttgtgacaactttttgctttaattggatattttatataactttcaactacaaacagtttccaactattccaaaatgaaaatatttcatattattcttttctattgttttgcaaattattcagccaatactaaatatgattgacaatttatgtacatcaatacttaaaatttctctttattccttaatataaatgtaaagcaacagagaaaaactatttaaaatttaaagtttacttagtgaaaaatccaatttggccaattattaatttggaaacatctgatgtgcttcgtacggagccagtgtcttgcggcttgaaatcaggctgcatatgaagttaattgaaattgcttcggtattgtaattaccctgcacttttctattacttacttttaagtagaagaaaactgggaactttatattcacagaaaagtctttgtagaagggcgtctgattatgaaatactgccaggttgaaaataaatatcattttatggaaatggatcatttaaagtatattttatttgcctcacataataaataatttaccctctaaattcatcccccattttgaaaatcccatctttggaatatctaattttaaaagaaaagactcagcttttcaaagatggccccttctacttgaagggcaggatggagacctcaagaagcgcctcatggctttgcttgctttacattggtgacggatcagtgttcagggaccaggtcccagggctgtgaatgtgcccataggatttgatgtttgcgcactgacgtttcagtctttctttacaaggatgatttggagcttgtgctctccttagtacccactgaaattccgctggaaccagatataatgtcgcaaacgctttgtaggtccatcttcaatgcgccgaaatttgagcaggttattttgaaactgcatttgcataagtccatctgagcaaacatttttatggagttatgaggtgtggtttgcatcagccatctttgagaaaatatagtggagctactgtgctcggctgcaaaacaagttgtctgcctgttgatttggggaattttgtgagctacagctttggatgaaattctcctctggtggaacacatattaaatattattagagaacctctattttttctagttattttagtgaggtcgttatgtaactggtaagaggagaagttttgattgctttcaaaatgatggcgacatcaatcttcttcatgttgcatagtgcgtttgaagattacaaacatttttccacttactgtctatgtttactgatttttattagtaatggcttttattttagatcaaagtcaatgactttggaaaaaccatagtaacaattataataaaaatcagttcctgttcacgttatatttggtgtttagagaactgccgtatactacatttacaaagataaacacatgaagcgtgatgactaataatgagactgattttgtttgttttatggacccagtcttagtacttatgaagattgcatctagagttaatttctctggagtacaatgatttcatttccttgtcattgtatttttagcttccattaagaatcatccataccttttctgctcttgtttactgtaaagattatcagccatgtatagacacagataattaatattttataagatttttattttaaatatgcattctccaaattggctaatatagaggcattattgtatataaaacacgatttaggctatttaggaaacaagaaatataaataataccctaagaggagatttgggataagttaggaaatcagaataatttgagaacttaacaaatatatattttttccatactagcagaaataagaaaacattgacattctggtgaatgttttataaggatttatctcctccaacatttacaatgttttatttttaaaattattttgttttaatcgtgagctttaaagtcaaacctaatcctttatttataagaagttatttattaaccttgatgaacgtcagaaatttaagttttaggttgccagttttaaagcactcattagaatgaaaacagagccactcaattccgtgtgaaatgttgaagttagctgtcagatggaaccacgaagtataccactagccatggaggaaagaaaccaaacacgtgcacccctcttatgaagtgaatgtagaggtgattttcctaacttatttgatttgcagcaaaatattcctgggtaatgcgtggcatcaggttgcatatttaatttgagtatagatgacacttttttctgtattattttttaagcagtgaataaaaataattataaacaatagaaaaagttttggtttagcatttgatggctagtgttacctgcgtgtaaatgcttgtagttaatgaaaacatgaatccagctttgatctctttgatctatagtcttccgtatagcattagaacactggctgtctatattttcagagcaaagtgctcccctcactcggaatagaaaatgttgtaagtagcaactccgatttacagactctaattttacagacattctgcagaaggatctccgtgtaactgttagggagtcattcgcaggcaagttgtgtatgatgttcacccactttgatgggtatgctgacaattacatccagagtcagagagaagaaataagaatttgctaaaaagggacattccctttcattcatacttggtcctttctggaaagaggatggaatttctaacatctgtgccagttaacatcagtttgagcccaattttaggggaaataggaatacacttgtagaaggaattttgaaaattttaaataccatcttaaactgcacataagacaagcattcagcagggaaaacatctgagaggattaagcctttaccccaacagggaagaaaaggggggggtgctattttcttagcagcctgaatgattcttttgcttatctagaaagctttccaaagttttatcagaaaaagaaattttgcttgagggtttgttgtgataagtatttttagatagtatgtataatcatttagttgtgaatttttctcaaattgccaaagagatcagtattatgaaatgtagtacattattcccattagtcacagtaaaggactatgcatatggtgcacacagagctgttctaatgccagtgctgtaggggggaaaagaagaagaagaagaatttgatcaccctttttatttttctatccatgtattcttttgctacctccttcgcagtttatctaattaataatttaaaaagcccaaatctgtccattggaatgtgaactctgatctgttaagatctctttgccagtcctaatagtcaccagggggcagaaaaaaaccaaccaggattgactcacagtgaaatgattccacattatccagtttctttctttccttctgatttatttatttatttatatatttatttatttatttttgtggctttaagttcttgactccagtttaaactaatattcttccccgcccacaacagccggtcctcaagtgaacaaattgatatagctcaattcacaggtttgataaacaagaatacacaaaatgttgggaactggggtttaatcaagggatagaaattaaaatggactgaactaaatatggaaagtaagaattgaggaagcttgagatactggagttaaaacccaaaagagaagttcagaagtaggacacccctctcccttcatctgtcctggtctccctgccagacaaaagcttgaatggtctcctacaccacaaaatcctacttaatctgatttttatttcctgccacagtgattatttaattggggatggtctaaatgatattatttggtatattttaacagggaaaattgctgtggatctgcagctagtgtgagtgactggtagctgcgtttagagtgttgaaaagttttgcattaagtaaaatgatccatattacagaatcatggcaaagatggtaattagtggtttgcagaaaggagcacacggcagttccctttctgtttaaagaacctggctggatcttgagaatatgcgtgttatcctggatgcctaatactgcatgttcccaccagtgagtagactggcagattctgatcctaattaagaagacatgtttttgaatcaggaatgtgaatttggtttgcaacaccaccacgggggtattgttggtgagctgatagtttgactggctccatgggtggtcactgtttaaattccacccaactaaagagctgtacaagattttagtcttcaaagtttacacacagcaagtgtggggagaagttatcactgccagctgttgggggaggaagtgaaagtgagaaggacccctccccccaaataacttgtgtgtgttttggatatgttgcatatatccatttaatatgataaactctttaccgcggtggaagttacagtcaagttgattgatcttcctcttccccacagctcctgatggattttataagataagtaagtcccctgatggtttctaaggcaacttttccaacttgctgacagcagatctgtaggggagatggcacatattggtgctgatgtactttatgggcaaaaagggagcagttaagcaacttgcatgaggatgtgttcataactcacagctcagttggacaaatcaatctttccatgtgttcagaaacaaaaggcaggggggtcatgcatgtgtttgggagtggttatcaccccatgaagatagtttccacgccaattttgccttctttaatgtggtatttgctttaaggctgtaccagggccacttgcttctgccttttctttgcacctgctttctcttgatcacactaatgacccatcagttctcagttaccacttcccactctgacccaaacctggaaacctccaattgctgctgtctggacatcttaaatactttttggttttgcaacttgtctgtggactccttcccgaatatgtttttaagttttgttaggcctgcccttcaacctgccctccagtgtcaggagtagactaggtaatatatattttaaagatgcattggtttcactaaatctcctcctttggtttattttgaattaattattgaacagaatgatttaagatcagtctgatattttcaggtgtaaaatgagcatctttgctctaagttaattactgggcttctgtcgaggagtgccacagaggaaaaaactctggactgggagtcagtgacctggacaagccaattaacctttctaatctagcctctccagggattggaaatgatcaattgcagtttcttccaagaataaaattaggtggctcttgtgcaaatcttagcaaaattgtggagtgatacccaatgtagaatgcctccctccatctacttcctccatcacctgatacggaatatgtcccacatcaattaaatttagccatggacacaggtacatatttgtgacactgatcacccatgaatacaacaataaccacaaaaagagaatgaaatactttctctagcattcacaaagaatatttggatcagtgacataattttaaaagtcagaaaaataaacactaatgtcagtgaacaggaaaaggttttatactgttcttcaatctctaaaaatgtttttggtataagaataattttttggaatgttaaagtaagtactttaacatttactttaacaaactgaaagtagcactttcagcttgggagacagagataataattttcatgtgtctgaattggattgtgttaaacacaggccaacaggagtgtgtttggtgacatcgatggtttcagagtcagagaatgtaaacataggacccacaaacgttttacaggagcacggctgtggctactgcagggactcctgaaccgtgacgcacagtcagttggccgcagagaccagcctggagctcgccctaaaacctctttgcagccttgcagatgtcatagttgtcccaaagctgggcctcatgcttccgtgtagcctcactgaatcaggagaccgagtgtttccagagccaggatgtgggcgctgtggggccagtgctgcatcctcctgcgctggcaatagcagagttgtggagaaactttatttggtatttgaaatgatcaatattttaaccttctgcataaaaagagagagaagtctgtgattaaatcttgatttaaagtcttcaaatatgtacatacatgaggatgaacataagcatatttatttcaacactgtctagaaaagtgaaaattagaaaccacttaaatgtttctcagttggaaacataaaccatgtgtaggtataaggtcatgtactactcagccattagaatgatgctgctattttgcattgattgatatggaaggagaaccatataatattaactaaaaaaattacaaacagcatgtatgcaaagatctcatgtttgtttttgaaaagatgtgtatgagtgtgtgctggtgcctgccagccttaaaaaacatctgaagaacaaatgtaaagaacattaacagtagttctaactctgggtggggcaattagactggtttgtctttttttcttcctttttaatatggtctatttttttaaaattcagtgagcatgtattacttttacaataaaagaaaacaataaaactatttttttctttatctatttcttttcctaaccgtctgtacctgcgagtatttcatttttaaaaacagcaacagaaggagtagacatttcacattggtattgcactgtcttgaagactgagctgccctttagcatcttacattttagtcctggaaggtagctgagagctgttttagcccagccttcctgtttttctaggtaagacaaatgagcatcagagaagtcaagtgaattgttgaaggtcacacagcgagggagtcatcaggctgtgatgagaatccctgtatttctgtcttatattttctgctaagccaccattttgtcatcctgggaatggaggagagagaaatggaggcattcataaattaaccgtgtatgtaccagccttagtctactcacttcccctaagagggttgagaaaagcatccttggttgtgttatctcctctcaccccatcctgctcacccacccacacgggacttttatgggagtggcagtagactgggtctctcctgggcatctcatgctctgttccttcctgccaaacagaagccaaccatcacattttcttctctgctcttctttgttcaaggttactctttttccccagatccttaatagaggaaaaacccagtacctaccttcctttcatacccagaaacgtcctcttaacaccttcaagctgtggtttaaagatgaaccttttgagatgtaaaagcataactaatatttaaaggaaacaaaacacattttacttcttactcccaagccagttataggaatgcccattattatttctgccaccccaattcccactctgcttcaaatttgtttcaaccaaggatataatttggactgtatttttaaaaagtaaaccttgctttgcggggactatatttgcattcttgcttgcccttgagtgtgctctctcttgctttttcttttcctgaactatttgaaagtaatttgcataactataattttgttatcatagctcaggaaattagtcttatttaatttttttctaataaacactaggtttttaactttcatttgtcagataatctctcatatagctgatttttttttttttgcatttgtttataatgtctttctctttttttgagacagggtctcactctgtcactgaggctggagtacagggtgcaatcacagctcactgcagccttgacctccctggctcaagcaatctcccacctcaaccttccaagtagctggtactgtagacgtgcaccaccacgctctcctaatttttgtattttttgtagagatggggtttcaccatgttgcccaggttggtctcgaactcctggacttgagcaatcctcctgcctcagcctcccaaagtgctgggattacaggcatgagccactgcaccagccatttcttctttttaatctaccaagtatacccacctctttctactttccaatactgaagattacaggctagttgtcttggagaatgaaccatgatatggctgtgactgttgtttcttcatgaccagatccaggttaaacattttggcaaagataggctaagagtttgaccccttgtttaacatggcggccaccggattgctccattgtagacagacatttttctgtttgtgataagtagtaagttgtctgcagaggtgctaccatgagaccctctgaatatctatgttccaacagactttcatctggtggctttgtcttttaatttgattaaatatttaaggagcaattgtaatgaaatatgtggatcactttagaatgcatgagtttggacacacagtttatatcaaacagccttgcaaatatgtttgcgttgtatcaccccatagatattatctagagcctctggatttttctagtcctgacttcataggacttgatccatgggtcagctacttcccatttaactctataagagacattccatctcttgagttgcagtgcttttaatgtccattttaatgctaatggaaataagtggatactgatgtaatttgtactgctcatcagatttttttgggtatcctcttgaagttatgttggttctttgcagaagccttttaactctgttttcaaaatcactgtatgaagcaggctttaaaaatgactgatgacttgccctggtgcctaaactgggtgagtcttggggctggtcagtgactagcagtttgttcatgttttttagatttaagttacacagctatttttgcctgttccactttggtactcctattttcatacacaaaatatgtatgggtgaaaaaggtggtgtggagtagtgaaaaggagcaggagcaggcatgatctatgttctggattcagctttgccactactaaccctgagcatcagtgttcttatctgttaaaggaagcagtaataataaagtgaataacaactaactcgtacagagtgctttctgtgtgccagccactattctaaacagttgaggtattttcaatccatttacttcaacaataatcctgtgaggtaagtgttgttattctccccatcatgcagatgaggaaactgaggcacaaccttactaggacccaggaaagctaagaaaaatagtatttatgaaaacatggtggaatggggcttggaataaagaatgttatactaattcaagcaatcctgtcttctctgtgtaaatatctgtttccttaatttatagaaaatccatcacttacaagaaaatattatagaaaaaaatgactaaaataaatctgaaagtaggtcaaatttaagacaaactaagcaatccaattaaaacttttttttcctgtttccgtcccccacccccgcccttttttttccccttaaaactttaagtacagctttggtttaaagtgaaatctatatcccaatttaaattccatgaacaaatctgactctggcatttgattcactgtcttactctgcttgttatgcatgttaaacaagacctaaatttgatgctcacagagagcacataaacacttataatcctctcagcatgtgctaaaataataacagacacgatagtttgatttgcaaagtgtgtctgccaacttccaccagaccatttttgaaccaattcagaaaaccaggattctgcaatgattaaagtgtccaaggctcctattcatagcaaaaggaattcctgacttgaaacaagtacacatgaagctcagctagtctctgccagacatactttttgaaccatctttgcagacattgttacaagtgttcttttgctttaagaaaccatggtctgtaacaaccagactgaacagaatccataaactggggaaggattgtgccttttgatctgcgacagggtttacagtaaaaatcctttaaaccatgagtttctcagtgtatttcaaatagcaattcaataatgctaacaattcagaggtctaataataaaatttaaaactttttttggtcttttttttttcaattttaagaggtataattgaagtgtggtaagctgcacatgtttaaagcatccatcaggatccattaaaccattaaacaattgagataataataaacattgttggctgggtgtggtggctcacgcctataatcccagcactttgggaggccgaggcacgtggatcacctgtggtcaggagttcgagaccagcctggccaacatggtgaaactccatctttactaaaaatacaaaaaatttgccgggcgtggtggtgggcgcctgaaatcccagctactctggaggctgaggcaggagaatcgtttgaactcgggaggcagaggttacaacagtgagctgtggagatagcgccattgcactccagcctgggcaacaagagcaaaactccatctcgaaaaaaaaaattatcaccccacaatgtttcttcatacttcttataatttatctttccctcttctccttatccccctcacattcagggaaccactgatctgctttctttgtttgcgtttcctagaattttatacaaatgaaatccaagtatgtactcatgtgtgtgtgtgtgtgtgtgtcttctttcactattttaaagtgcataatttagtgacatcaagtacgttcacagtgttatgcaaccatcaccactctccagtaccaaaatggttgcattgcctcaaaaggaaacttcatacctactaagcagttgcttcccattcccacctctccccagtccctggaaaccaatctgctttccatccctatggatttgcctattcgggagatttcatataaatgggatcacataatatgtggctttttgtgtctggcttctttcacatggcatcatgctttcaaggttcatccatactgtgtcatgtgtcagcacttcatgccttttcactgccgaataatactccattgtataggtaccgaaaacgttttctttgtccattcatctattgatagacatttgggtttttccacctttttactattgtgaatagtgctactgtgaacatttttgtacaagtttttgtttgaacatctgtttttggttcttttgggtatatatcttggagtggaattggtgggtcatatggtaattctttttttttttttgagatggaatcttgctctggcacccaggctggagtgcattggcgtgatctcgattcactgcaacctcttcctcccgggttcaagcgattctcctgtctcagcctcccaagtagctgggactacaggcccatgccaccacgcctggctaatttttgtatttttagtagagatgggatttcaccatgttagccaggatcatctcgatctcctgacctcgtgatccacctgccttgacctcccaaggtgctgggattacaggcatgagccaccatgcccggcctgttcttttttttttttaatggccatcctagtgggtgtatgaagtactatctcaatgtggttttgatttgtatttcagtaatgactaatgatattgagcttcttttcatgttggcttgttggccatttgtatatcttcttttgaggaatgtctactcaaatctatcatccattttaaaactgggttttttacattcttgttttggaatggtaagagtctttgaaaattctggagagtaggcccttatcaggtgtataatttgcaaatatgttctcctattttatgggtttgcttagcataatgattttgaggttcatctatgttgtttcttgtatcaaaactttgggccttttactttgctaagtagtattctgttttgtggatatagtgcaaactctttatccatctgttgatggacatttaggttgtttccaggttttggctattacaaatgaagctcgtatgaacattcctttgcaagtctttatctggacatatctttcagcttctcttgggtaaatttctaggccaatgatattttaaccttttaggatcacaaatattgtacataagaatcattgtttgggtgaaacgtcttcaaatttttattagtatgtcattgaatggagcatgttaatgtaaccctttaaggtgtttaaagaatatacactttttcatctttgttttcagaatcaatcactcattagtttttttttcttctgttgatgaatcttccttcaatagtttttcatttggcaagtaattatgaccatggaagtcgggacacaagatgaaaaagacaacaaaactgcagaacttcaaactgaaagaaaccctaaaaatcacctgagtcagctcttttattttacagaaaaggtgatgaggtccagaaaggagactggatttaccaaaggccagccgagtattagagcagttcggtggagcaggggaaacttacacacctgtgagggtaatttgacgtctcctagccatgatgcaacagtgctggggggtgagtgaatggcgctgtgttttacagtctgtagcattcacagggcactttgtttccttctaggttatcccagttaatcctccaacaaccctgtgaagtaggtagggactaagtaactaggagtagctcagggtcacctagccaatgatcggagatcccgggctcagagccaggccttctgactccttccaagttgcgtgccctcctctttttcgtttgaatttcctcctccttgtccctgcccactgccgtccccttagttcaggcctcccagctctacccccggcctcctgctggattgggctccactccttctttctctgcagcagcacagtcttgaccttgtcctctgcttgctggaagccctgctgtggcttctcctggcctttaggttaaggttcagactgcatggaaggcctttccagatctgccccactcagccctccagctccagaacttcctgtcctctcttggctgccctctttccctctcctcaactagaacattctgaattctgcttagacctcacctcttccagggagctttccccaaccctaagcaggaaggagggctgagtgaccctcttcctgtaattgtctgtggctcccatagtagcatttgtccgtgctctcctcttgcttgtctcccataaagaccatgcaaagtccttgcagtcaaggccactgccactcacctttgctatcctcatcacctagcagagcccctggcacatagtgtgttgaatatctgggaatgaggaacttaactgcaactgaactttcaatctaactgacttggtgatgagaaatactagtcaggatgctctcatgggtgagacctgatgtgacgccaaagcttggttttctccagcttatgttttatttggactgcctgtctgaaagggctagacagacatttatgttcagagaggccatataagaagaatataaatgcggaaagtcataaacttcagctctgctctgggctccactctcaagccactgtgtgaccagaggtagcacttagcttcttagagtccacatgggttaaagggggaccagggtatggggcttgttcaaacagtcaatgagatgacaggtgaacatgccttggtaggaaagcagtactgaatacatgtgtcctcatgtaagccagctttttgtctcatgctgtcatctccagccagaggccagattgtgtgcaggcaatttccaggctgaatttctgagagatttgatccaaataggataaatggtggaaatgaccactaggaacactccttaaaacctgcttgcatcaatgctttcaatgatacatttctgcatctcaaaaaaaagtttctaagccctaagctagcatctgcctatttcaagcaatttctgttcttttttttcttttcttttctttcctttcctcttcctcttcttcttcctcttcctcttcttcctcttcctcctcctcttcctcccgttccccttccccttcctcttcttcctcttcctcttccacttcttcttcttcttcctcttcttttttttttaattttttttttgacagggccttactctcacccagactagagtgcatactgatcctcccacctcaacctcccaaggagctggggctacaggtgtgcaccaccatgcctggctaattttttttgtatttttttgtagagtccggttttcaccatgttgctcagtctggtctcaaacttctgggctcaagcgatcattctgcctcagcctcctaatgtgctgggattataggtgtgagtgaccatgcttggcctcaagcaatttctaaaataacacaaatcaagacaacagcaacaccaagatactgctttattattgccttgacatttgcaataatgacagtttaactatagcagtaataatgacagtcgacttgtggcagcttaaaaaaaaaagaagctgcctggaaaataagtgattgctcacgattcctcagggagacttactccaaccaccctatttaaattgcatcttgaacccatctcttcccatccaggctgtcttattttgctttatttcttccacttgttgtcttctagcataaggatccccaacccccaggccatggacgggtaccaggctgtggcctgttaggaacgaggccacacagcaggaggtgagcggtgggcgagcaagcgaagcttcatctgtatttacagctgctctccatcactcgcattactgcctgagctccgcctcctgtcagatcagtggtggcattagattctcataggagggcaaatcctattgtgaactgcacataggagggatctaggttgcatgctccttatgagaacctaatgcctgatgatctgtcactgtctcccatcaccccgagataggaccatctagttgcaggaaaataagctcagggctcccactgattctatattatggtgagttgtataattatttccttatatattacaataaataataaagtacacaataaatgtgatatgctggaatcatccctaaaccatcccttgccaccatagtccatggaaaaattgtcttccaaaaaactggtccctggtgccgaaaaggttggggaccgctgttctgacaaattatataatttactcatttattatgttcttactgtctattatggctcctttcaccctgcccccaccacataagctctccaatggcaggagagttgtactcagtgatttaccccccagggcctaggagcaattcctgacacctggaagatgctcactaaatatttgttgaatgactaagtgaactataggtaaaaatactgactttagtgattgttatgtggtggcatttgttccctctctgagcccacctaggatatgaactatatgggcttcagggtctgagttttgtgattcaggaaactgaaagtggaaggtgttagaagattgtagcctctgctcctgtggggttcttggaagtaagactctccctgggcacccgtgacttggtgctcttctcatggcccagctccagcagttgccagtgtagccagaaccccttaggctgggatctgacttgtgtatttggtgggatcttgatggtggagggagagcagcaggcctgggctcagtccctagacatagaggccaaaaaagattggaacaaccgtgtgtccagcaataggggattcgtgaataacacttggctacatcctcccaatactattcggaccatctctgggtacggatacagagaagtctcaagaatatattactaagggcaaaaatcagggtgtggaaggtatatacagttggctgccttctctgtaagaaagcagggtgagaggaaggtgaatatgtattcatatttgcttcagtgaccagagggtgagatttgagagatgttgaaagtaggggccaggcacggtggctcacacctgtaatcccagcattttgggaggccgaggtgggtggatcacctgaggtcaggagtttgagatcagcctgaccaacatggcaaaaccccgtctctactaaaaatacaaaaaattagccaggcatggtggtgggcacctgtaatccaagctacttgggaggctgaggcaggagaatcgcttgaacccaggaggcggaagctgcagtgagctgagatcatgccattgcactccagcctgggtgacagagcaagactggtctcaggaaaaaaaaaaaagatagtagcattgagtggcagagtctatatgctgtctaatcccagctgctgggaggacgctcaagggagatgatcttcagtggtgttggtgtggataggagccagcacttgaatggtaccattaaattccaaatagatctgtgctttgttagaagggctgtgaagggatgaggaaagaaaaaagcactgagaagctctccttccccagtaaactttcatttccaattcaggaagccacttgcggttcacaaagaccaaaactaatctatcatattttcaaaccgaatatttaacactgtgctgacttctctgacatcactaggggagacagagattatgtgtaaagtgccaaactgggtcaggcagttccttgagaacatcactgccctttctcaaagaaatttcctcggtctaaaatgtagagaattgaatcagatggctttcattcacatttctctcagaggtttttaattaaagctcccaagattttggaaggattaaagaaaacttgtcagcatgtaaaacatatcactttttggtagggaacatgaaatgatacaacctttatggagaagttggcaatatctagcaaaagtacatgtgggttaccttttgaccaatcaatcctattataggatctatcccaagatacacacacaaaaattttttaaaagacataggcacaagcttctccatcatgtcactatttgcaatagcaaaagactggagacaacccagatgtccatcaccagggaatgggttgagtaaaggatcgccctccttcctctatactgatgtgtagaacacagtgtctgagattaggcagcctgtaggctctgatcttcctgttcatccctacattggacatccctcaaatctggcccctctggtcactgaagcaaatacaaatatatattcaccttcctctcaccctgctttctttctttcttttttttttaagacagagtctcacactgtcgcccaggctggagttcaatggcacgattttgtctcactgcaacctccgcctcccaggttcaagcaattctcctgcctcagcctcccaagtaactgggattactgatgcacactgccacacccagctaatttttttgtattttagtagagtcggggcgttgcccagactggtctcgacctcctgagctcaggcaatccacctgcctcagcctcccaaagggctaggattacaggcgtgagccaccacacccagccatcaccctgctttcttacagagaagatagccagttgtatacacattccacaccctgatacgtagaacacagtattctatgtatcaatgacagggaagggggacgatctccgtgtactgctatggaatgatctccagggcgtactattaaatgaaaaagcagagtgcagaaaaagcggatggcatgctatctattatttaagaaatatacatgtacttgcttatacttttttaaaaatggaagaataaaccaataaaaatatttacctgtatgtgtaggtaggaaatggaagagtgggtcagaggtagaagctagacttctccaaatgtgttttgttttgtagatttgactttggaagcttatagatgtttgtcttaattataaaaaaattaaattcacatggacaaaagtaatccccaaaaatcaagactaaagtgaaacaaacttatgtatcaagttggtggtttaaccacacaattatttcagataacttgaaaacacaattaatttaattatacatccctagtgtatatcttaccgtcaacgtgaatgccaaattaatcttgagctgttttcagtaatattgtaagtaaaaatgttgatagaactgtactgacactaatatatatccacacacacccacataaacatatgagtatacataataagagcaattatgttgcaatcattagaaaccaaaattttcagtatacaaaaacagtgacaattttaccatcaagatattaaatgaaaatcctgtaattctaaatttgaattggaaatattagtaagaactcctgatgtattttcttttaaacaaataaaaaaatttttctaaccttgtctactgaacagcctagaaataatgacaaacctagtagcagtaagcacctgtaacatccagattatggcctctaagtacattttttctgctaaaaagaaactaagaatccttagaaaaatgttgattccaggcctggggcagaaagtgtacaagatgagctggaatatcttgttgtatcagaaagcaaagaagctatcaaagaccacggtgtcctgtgagaagtactcagaagctaattgaaggggctccccctgtccaaatattgaacaatttgggcattaaaaataataactatagtggatttacatacatcaaatatattaacatgtgcaaaatctataagttaaaaaaattcagtagtttcggccgggcttggtggctcatgcctgtaatcccagcactttgggaggctgagagggaggaatcacctgaggtcaggagtttgagaccagcctgaccaacgtggtgaaaacccgtctctactaaaaatacaaaaattagctgggtgtggtggctaacccctgtagtcccagctactctggagattgaggcatgagaatcgcttgaacctgggaggtggaggttgcagtgagccgagatggtgccactgcactttagcctgggcaacagagtgagactctgtctcaaaaaaattttttaaaaaagaaaataaataaaaataaaaaaataaaaattcagtagtttccactatagggtgctggggaaccaactttcatcccctttgtcttcctcctgtcctccttcttcagtctctctctctctctctttttagagacagggtccttgctctgttacccaggctggagtgcagtggcaccatcatacctcactgtaacctggaccccctgggctcaagccatcctcccacctcagcctcctgagtatctgggactacaggcacatgtcaccatgcctggctacttttttttttcttttgtagagataggctcttcctatattgcccaagcttgtctcaagctcctggcttcggtgatcttcccgcctcagcctcgcaaagtgttggattacaggcatgagtcaccatgaccagtcagaaaattcttcatagaagaatgccgtctaataaatacagaaggaatgaatattagcattttgcaacccctggtgaataatgagtttagacaatgtggttgttaatggctactaagctgttaggtgcagctgatggcgttctttataatggagggatcaggctgataatattcaaacccactgatcgatcttaatgtcttggcaggcttgagatttaactaccagtttatagaaaatacaagggatgcaggaacatgtacaaatgatatcgggcagatgaatcaggtaatcagaaaatgggacatgctgcaggcctggtttccttaacaaataaattttaagaatcaaaatagcaggaggggttatctgtagattaaaaaggacttaaaatacttatcagcaaaatgtagtatataattcttgtttgggtcctagctcaaaacaaatctaactgtaacatgtatacatgcatgcatatacatatatatgataatctatgatatatatgataactaagatattatatttgaatagtgaggttaaagaattatttattcatgtattatttatttgattatgtgaacattaaaaagaatattatttattagttacttatttatagctgtggtaatggtattttgattatgttaaaatacagaagttggctgggtgttgtggctcatggtcgtccagcactttgggaggccaagatgggcagatcacttgaatccaggggttcgagaccagcctggacaacatggtgaaactgtctctacaaataatacaaaaaattagcccagtgtgatggcacaaagaaagaaagagagagagagagagagagaggggaaggaaggaaggaaggaaagaaagaaagcagttatactctagggttgtatactaaagtatagattaaatatgatatgtctgggattagcttcaaaataatgaaggggggtgcaaaataaacaagattggccatagattgataatttttgaagctgggtggtgagtacatggaaatcattatattattctctctacctttgtataatttgaaagtttccgtaataaaaagttaaacagaacaagacatcagctcagccacttggccagttctgttttcagatgtccttaaatttaatattgggctgtggagccgacagacccttcttaaaaatcacctgggggctgggtgcagtggctcatgcctgtaatctcagcactttgggaggctgaggcaggacgattgcctgaggccaatagtttgagactagcctgggcaatatagccagaccccatgtctacagaaagtttttaaaaaattagctggctgtggtggtacatgcctgtagccccagctactcaggagactgaggtaggaggatcatttgagcccaggaatttgaggctgcagtgagctatgattataccactgcactccagcctgggtgacagagagagaccctgtctcagaaaaaaataaaaaacaaaaatcacctggccagcaagtaggaggctgagatcctaactcacatctgtctggctccaaagctcacagtctttccatcttaccttacagaatttatgtctctcttggggctcaaactattgtaggattgtttagattgaggattatagggttttacaagcagctgtaatataaacatgggaaaattggggcaaggcaaatcaagaacaaaaactgccaccaaaacatcagagtcggtcttcctttgagggcgggaaatttatccaaggataagggaagaaaatggaaatagaccgcattcctcccactgtggccttattgggccctttctgttgccaccatcctgggctttggattgagagagatctgggttaggtagcacagcctgttacttaggatgtgtgtggtcttactgttctgtgccacagttgtttcaaccaacctcatttggctgttgtgaggatgacatgagattgtccatatgatgcttaccacagtgcctggcaagaggtgaggtctctgatgttcatttagaaaagaagactgcagtgcattcaccaagatcctaagaatcccaaggctgggccggagcttatgtgtttggacatccctgtgacgtgggtacccccactgaaccccatgatattctccagcactttcttggggaccttgggccaccttgcctaagtttgggatgatcatttagcctgaatgaggaggctcagtgctctaaggatggcattttttctacctggctccattttattttgtcatgtggcttgatgggcatggacagtggggaagatcctgcctcggtgggtgaatgaaaggtaagtagctagatgactagaagccagcttgaactttgccagctttgagattggaaggaaaaggtgaaattgcctgctcttcctgaagcaagcaccacattttctctcctttctaccttgtttgcctcttacagccagaacccagcccccttttcatcactaatctcgtaacacacagggcttcatcctggcagtgtcgatcttttcattagccctttaagaatgactggcaaatgcacttgtttgagtcatttgatcacctgggaagtgtctgggagccatgccttggagtgcctcactgatcacaaagccatccagtgtggcctttgattcctgggcccctggtgtcctgctcactttaccccccatgcatgtgacctgcccactttctggggcttgggtgtgagtgagtggtgcagggaagctaagccagagggagccctgatttacgaactgtccggatttaactgaggctacagcacttttattaatagaacatgctgcatttcctttttataaaaatatgaagatcactgcgctcaggaaaatgcctggtgactttctgtctttagggcatgttcatcaccaggctaaaattaaaagtgaagtcaggcccttcttgcatctatttttaactaagtttagcatatgaatgtgaacgtgaagtctttctttagatccccctaactcaattactgacgtatgccaagcatcccgcctggaattccagagctgtgtctggggctaccttgggtggggaggccaaaagggaattagggaccactagcctagccccctgctatctgactgtgtgcgtcttcacccatctcagcttcacttactttggaaggttaaggtgcagccagtcataatactgaaaagcataaaacaagggaaaaactaaccaaaccaaccaacctatggccattttgtgatgcgtaaagtctcccctaattggcacatatttttctagggggctccaatttagaagcagcgacttgggttgaaggggagacactggattataggggagaccttgtcattcaagcagaaattgcgaatggccccaacataccaagggagacttgggacaacaggtggagggagggagaggaaaaaaaaaactgaacaagtgtcgttcctgcccagagagtttgcgatgagtgatgagagtgccagagaaaccttttagaaaccctcttaaattccctctttgaaatctttttcatgtctgctctttgaggactgtgaagagaggggagggtagaggcagagttgatcccaactcttaagattctttggcctaatgtttcacttgaaggcagagactgacgaagttcttttttgaacttcttaggacagttccctgtggttacttttttagtataacaattaaaaaaaaaaaaaccaaaaaacctactgatcattttaagtcctggcccttgctttgttttgtttgaaaagtgacttttaaaatggtgacttttatggaaaacatatttacagtttgttaaagttgtgtcatttctctttgcatgtttacatgtatgtgtatttaacttagttgtcttgaacctcataaaggtgttgtggtttttaagcagaggaaaatcttccttcgttttttctggaatagcagcaaagccatgatggagaataagcagaagattaatttaaaatactggttactttggctaatccactgacggtgagcttgcttatggctggagaactatgaaagtgtttccagatagcctgagagggaagcactgggaaggagtgtggcaagtctgtatgcgtgtggcggggtaggggggacagggttgtcttttggggaataggaatgatatttaaacgaccagctcctccatgtattatttggattttctgttaaaagcaataaacttgaagtaagacgtgtttacaggccactacaatctatctgaaaagcctcttatggttttttgcctcccattcaaaaaccacttacgtgattgtatgtgcctttcaacaaaactttggattcaattacaacacttgtaggctcagaagattgctttcaaatctgaaaactttgcaccttcacttggttacagtactttttaaaaaatggagatacggtcttgctgtgttgctcagactggtgtccaaaccctgggctcaagcggtcctccagctttggcctcccaaagtgttgggattacaggcatgagccactgtatctggcctggttgtagtacatttcaagggactggctttcccagccaaactgacatttttgggtctgtccagttagtaaaaggtagggattggggtggcaagagttgtacattgacacagttcttaagcacacagtgactaaaaggtactctactggcttttggagaaggcttagaacttggtcaatcgacaaactcctgattaaaggttgctgaattaaaaataatatgccatttctttgaaaccattcgatttcaccctatttagttgttccagaaatgtttgctttggttttaaccatgacccaactttatttagtaagtctaataattcatctctttgaaaccttttagtttccaccttattttttttttgaagagtgatttttttagatggtgatttttgtgtgaaataatatttacagtttgttaaagtggtatcatctctctttgcacgtttacatgaatgtgtattcaatgcatgttgtcttgagttgagaatttttgtcttgatttttccttgcttcaacttgatttcctagggagtctaaaagtttcacaccttggagttttagagtagattcaagaaatgatctagctcactcttgtctctttcccagggactgttggttgatatctggcacagacagataggaagtgaagaatgtggcacatccttagactgcccgttggtgagatctgaaactaagtttctcatgactggactgtatttctttagctgctgggtgtgaaaagccccagacattggcttctgcttctttcaccatcattatgatttgtgggcattgatgctaggcctggaatccctgcagcattcatctctgctggggttctctaatacagcggctgagaacggtgctaattccagctgccagcatgatcctccttccctggcaagagggagccccgctcagagaacatttaaataccgtagaaccatccctgttacaggtttcctttgggatgctcttgacgcaggaaatatggcttattctcataaatactttgagatgtacttcagtttctccaaactttatgcataacaacacgactgtaacaacaaaaagggaaattcttgaaagaaaaaatattagcagtaatctctttgtcagattgttatttttctcttttgtgttccttccttttatttttggtcatgtgcatatattttaaagtatcacacatggttttacattctattttcctgttaacattatgatgtaaaaagacttttcttgcagttgcatcctcttcataatttaatttttcatgatggcattggcgctgccaaagaaagtcactttcccatgccaggagaaaagaccatctctcctgtggctgcctcgaagcccccaggcctagaaacgtctccaatcaggaaacagaagcctccagtggatcatcttcagggatcgctggagaaccacgtgggcatgtacacatacctcctcactgagctgacttacccaaagttattattcacctactgatggacaatgatggttctagtttttctgtcttatcaatactatagtaatggctttcttcatgcatgtcattttggaatattttctcagaatgggattattatttctaagcgtatgaatatttttattgcttttgatatattagccacattgctttacaataaagttgtacctgtttaaaaagttagcagtaacataggaggatattggtctcacaataactaagcggaaccactctgcccagctttgaattccagcttgacacttggcatttaccagctgtgtgaacttctgcaaagtatttaacctacctgtgcctcagttactgcctctttaaagtgggagtgacacagtacccacctcataggtctattattgggaatgagtatttgtatattgctcagaacagtgtctaccaaagtattatgcattgtgcgctcgtgaaacaaacacctctccagctcaagattttttttaaaaaactaatttaatagaagtaaaatgacactgtttaagatatatatatatatgtatatatatcgacatgcttattaaccgtatttacaagaaacactccctttaaatctctttattggtaaagatatcttttaaaatgttaatttacagaagagatccattctggtgtgattattgatattatgtaggaattctttttcagcttttacagagttgctatccctttagggtggagtctcatcaccaaaatatcacctgggacccgaggtgctgaggctcataatcagccacttagctctgaagacttcaaattcaccccagagggacaaacttagggggtattttagggccctattagggactcttcttcctatcttgtccgatgacggctctcggaggctcctggttttgatgtctggcattgcttttacccggtgggcttcagggagccgtccctgccgcgctttgcgtttctccgcgcacttggacagggttctgccacgagggaggcgatgcctggcgccgcgggtgggggcagtggtgagacttcggcccctggtggccggagaggtcgcagcacttgtcagtttatggctccctcggctttccccttcttaatccgctttctgctgagctctccgaataattcaaccctcgtgtttgaaaactagaagcctgagaggtctcagcgagacagtcaaaggggaggctcccctcgccgagtgtcacccgggaccctgcgtccccgctctgcagagaccttctctccgggctgctgccgtcctccctcgcccggcggagcttccgtgatcgtcagccaaagcccccggggcggtgcgccgcaggcggtcttcccgggtgttcgcggaagctgcgcgctcgcgcccccacggttctccagcgacccctgaagatgcttccgtccgcggataggggacgtttcagacctggggtgggcacagcggtccccggtgagatggtcttttctcctggagtgggaaggcaactttcttttggagtgccagtgcccccagagtgctaggttgtaccgtggacttgtacttgagtttttcaaataaagcttgacacatacttagtatagagcagtagaaagcagggaggaaaaactcgtcatgggtccactatctaaaatcaactgatatttggaatagttcctttgcttttttgtctatacatacgttagatttattttttctagtttttaattgtactatgaagctcaactttgaactttgcattttttctcttattattattttacaaacatacatactggctgcataatattctgtcatgccatatacagccactctacttttgaatatttaggtgtttttttattttcattaaaaaattctgcagtaaacatctttctggctaaaacttgtttccgtattaggttatagtctcattatcatagggcagagtgagaatgtttttaaggttcttgatacatattcctgaatggcttttctttcttttttcttttttctttttttttccttttttctgagacggagtcttgttctgttgcccaggctggagtaccatggtgcaatctcagctcacagcaacctctgcttcttgggttcgagcaattctcctgcctcagcttcccaagtagctgggattacaggcacacaccaccatgcctggctaatttttttatttttagtagagacagggtttcactatgttggccaggctggtctcaaactcctgacctcgtgatccacccagctcggcctcccaaagtgctgggatcacaggcgtgagccaccatgcccagcatccaaatggcttttcaaaaaatttgtataaatgtttactcctgctagctgtgcttaagtgtttatttccggccagcctcaccagcaccaggaattatgagaatactcttaagataatgtcactaaggccacaggcgaggagagcttagaaggtactggctgctgaagtctgtgtgatctgaaacctagatgtatattctgcaatctgcttgtttccaactccccacattctgaggacagtggcctatattgaaactggaggaatgaggtttacttgtgtttcagggattgaagtggtactagaggttgtgttggattgctaagttcagagagccatcagaaattgttatgagcttgagtcacataaaaatggaatatcctttactgtgggtggcatagctttttagggttggcttcctaaacattttggggagaatgaatctaccagcagagaagctttcctttggcagtctgagggtgtatcttcctgaggcaaggccagacttgaggatattctaatcctccttcctgcatttttatattgcaatttcttgccaaacttgctgcctgaagagagacgatatctctttaagggtgcattttagttcatttgtgtgtcaggtgggtgggaagtaatataaaactcatttatggctactcagtctgcaaacatattggaaggaagggctgggctttaatatctgtgtaggatggaagtcatttttgagttatagtcaattcttatgttctgtaaaatccattagaaaacctgtacccgtatcagttcacatattctgcacctggctctcctgttcatggggaattgcttacaacagggaactcttaaaaccaagactgctgtttttgccccactactttcaggttagagcaggattccagtgtcctgaagtttaaacacattctgagcatcctctgagaatcattcccaattccaagcccatttccagacgatgagcagacttgaattacataacctgtagctgcacatttttgtcgtgaccacgcaagctcaataatgtctcccaagtcttgtagatcactttgaagctcactggattaatggtgttgaatctgtttaatccaaataatttgaattgcatcaggaaacctgcatattaacaagctggtaataagtgcaggcgttaagattgatcactgcttaagtcttcaagatcacatacaaggtctggtgtttttgaggctgtcgatgtactatattttttagattctttcttgatttcattctgcactcttgacatttaaaataatttaaatcaataacttcagaattctcccaccggaggatatgcctatttgatgtgattgtgtgtctgtgtgtgtgcacacactagctctgtattattgcctatggaggacatagaaatatatcatatactgtcctcaaggagcttgcaaccaagttgtggggataaggcaaacaaagtcaaaatatctaatacacgttccaaggcaggatgcaattctgtatccatggtacattgctgattgctgatgatgctctaaatgctgactctaaatggtggactgcaatttgtctggaagaagaacaatggatcatctgtgtttgggggagacttcatggaggtgggatttgggggagccttgaagaagtgagcaagttttggataggtggaagtgaacttactggctatacccggaaaagagcaggatgggaataaaggaaaagagagcctgttttggtgaataagtttaatattgaattgtgatagtcaaaaaaataggtaggatgatgggctaggtttgggaggaggctccaaagttaagaagcgaggcttatccttgagatcatggcctttaccacaaccagcaccatcatcattatgagcagctgtgtcttgcattcttataatgtggttctgaggactttacatgtagtatcttatttaatccccaaacaaccttatggaacagataacaattgttatgtccactttatagcagaggaactgggatataaagaagtcaaccaacttccagcgggtaaggtatgtgggcaagcaggggttcagatgaactgaatcaggcagcttgctttcagagtctgttcttcaccactgtataatactgtctcttggtgcttgttgaaagcccctgttgagattaacatagtccccctcaagttctaagggagccccgcctttcaagtcagacagacctgggctcacattctggctctaccacttaccagctgtgaccttggaaattacttctctgagccttgatttgctcatttatgaaaaaggaagaatatttacctcaggttgttgggagcattaaatgtgataatatatataatcatttagcagaatgcctagcagagagtaagcaggcaggaaatgatagctgctatggcttatatttcacagatatatgtagggttataatgcagtctctgagaatgagaagcagtgagggtggacatgatttaggtagagtttacttggtagtcacctgcaatgataattagctaacggatagtgggcgctggatttcttcttctggagcatcccaggaatggactatgaattccagatgtggttctgctttgctccaagaactgactgcatttccttttgtcttctaaaacccagagggtgaaaccaggacatttccattgtactgaaatttggcataaaatctggtgccaattgtacatcccaggggctgaaatcaggatatgctgaaattcccagtgtcctcgctctgctggttcccacttcctgacggcgctgacagataagtgccctgcatctcacagagagagaaaaatagatatttggaagtggtatcttttattgcctataaagttaaacaatgcacgaaacaattataaccaaggcagagacgtttagacaacatgcataaaaggaaaaaaacagtggaagagaaactttgctctaagatgaaatgctaattctaactatcgctctcagaatttatggggcaacatcacttagtacttcttacacttgcgttcctgcacatttcaaactgttcatatggtagtttttcttctgtatgacattctgcaattgtagagtttttctttatattacttcattcacaaatttcaaaattcacaaagtgtctatcaattaggaagaacaacttcttgtacttttctgatttgcagtctccttggttgtgacaaacctatttgttcttgtccctgtatcgttgatataatccaacttggcttctttggaagcaacaaatgctattttttttgcttcaaatccaatattggtttttaaatttgtggatgcaagaggctataaagaggtttaaaatatatgtagcttgaaaatattaatgtttttaaaaaatctcagagtcactttagaattttaaaattttcaagtaaggctgcaatcagatagatacttgtagactgtcttaggctgttttctgttgcttttaacagaattcctaaaacaggataatttttaaagaaaccaaaatttatttattatagttatgggggctgagaagtccaaggtcaaggggctgcatctggtaagggccttcttgctggtgggaactctgtagaatcccgaggtggcatagggtatcacatggtggaggaggctaagcgtgctagctcaggcctctctcctcttataaagccaccagtcccactctcataataacccattaatccattaactatgaatatgttaacctataaatggattaatccagagcccttatgacccagtcacctcttaaaggccctatctttttttcttttttctttttttttttgagacacagtctagctctgtcaccaaggctggagtacagtggctccatctctgctcactgcaagctctgcctcctgggttcacgccattctcctgccgcagcctcccgagtagctgggactacgggtgcccaccaccacgcccagctaattttttgtatttttagtagagatggggtttcaccgtgttagccaggatggtccctatctcctgacctcgtgatctgcctgccttggcctcccaaagtgctgggattacaggcgtgagccaccgcgcccagccaaaggcctcatcttaaaggggacaaatattcaaaccatagcacagaactatttggtgctaaatggtattttgggaaaactggagtgttacatattgtttaatttttccaaatttctgataaaacggaagatcttagatagttggtgtgttcgatgggcatgtatctcatgttacttgtcttcatgttgtagacatctctctaaaaataatgataccaaccaggctggtaaaatggctttctgaattgttttactcgagtcagaggggatttgcaccctctagatgttgctccttcacagcttaaccctcggggaacttcatttttaattcattcaactgaaagaagtatttactgaacacctattatgtgctaggtgctgtcttaggtgctgagtgatgaatggaataggtaattcttatggatggagcttcctgtctagtgaggaaaactaacataaaccaaaaaaataggtaactataaaacataaactgggataaataatattaaggaaaagaaaggatttctttcaaccttatctttcttatagacaatgtggggaaatagagctatgggagtactcaaaagtttatccacacaaaacaaatccctataaaaacctaaccaaagagcaaagattaaatgtaattatgcaaaaaaatgtttaggtgtcaaggcatttaaatacattactttgccattaagtggctatgagggtgtcactaaatggaattctgtttcaagacgtacttgagctcatagcatgttgagaccatgatcttctcataatttggttcactttgattaaagcagcatcatgcccactgcagcatcatcagagaaaggatctcctgagttaaggacacccatggaaagcatcctattgtgtgatttctcccttattgttcatttctgggaaggtacagtttggttttggaaagcactcttgagtgtgcaaggccgggggagtctggggtctactcttcatcctgccacccactcccttgatcaatgaacttggcttctctgagacttggagatttggtttccacatctggaatataaaggtgttgagcctgatgaccttgaaagatttttctaggtctaaattttattacagaagcagtgggcaataggagaatgtttggtggtagattcacttcatatctaatgaagatgtgacattttcatgatatgctgcagtagagggagcactggtccaggagtctgaaagttcaagctcagcaatacagagacttttggaatgacttggtttatgttcattcaggcctggagcacagatgggttcatgctttgctgcaacccacacttggagataaagaggctctgcagtggtttaatatgcaggttctcggttcaaatccaggatactctgctgaggagccatggagacctgggcaggaaacttggcctcctggagcctcaggcttgaatatatgaaatggagcctctgcttcttatttataagtactcctgtcttcctcccaaggttggcactaggatgaaggctgtataaagtgattagcacagtatctggcacatagtaagtacccaataaatgctcattgtcctttttcttcttttttttatttttaattttttttagagatagagtcttgctctgttgcccaagttggaatgcagtggtgtgatcatagctcactgcggccttgaacgcctcggctcaagtgatcctcttgcctcagcctcacgagtagctgggactataggcacgagccaccatgcccagctaatttttattttttgtagagacagggtctcactatgttgcccaggtgatctcaaactagtggcctcaagcaatcctcctgcctcaccctcctaaagcactgggattagaggcatgagccaccgtgcccagcctcttcttgttaataattatcatagttcctgttattgcagttcttaagctgggcacatcatgtaagcccctatgttttggtttcctgcttatggtgtctgcctcatggggttgttttgaaaatcaggtgtgactttatgcaagggctttgcgagcccctggatcctctctgaagggctgggcaggcaaagccacaggctggcagtctgtctgtctgcagcgtggctgtttcctgagagagggcttggctgagggctgggaggcaggtccgccttcctctagccctgatggactggggcacatgcagacgcacttcccagccaggcagacagacccagcacacagatggccacagcggcattcacttggtgattgtcattcacagctcatgccatctggtgccagagacggtcggcgggcacctcaatctcagtttcatccctggactgacactgccccttttaacctgctcttctcatattttgagataagggcacagtaggacagcactgtttctaaatgactttaagaacaattatttaggctaattaaaaacaatgaaacccagaaactgtgagtggtggcattagagccgggagccgggcacctgttgtcatgcaggctgtcctgggggagagcaattagtttgtttggcaaaaccactggaatgttcttggtgggggcggaagttcaagtttggagtgggtggtgggtttgctccttggatgtgttgcctccttcggagcagatggagtcgaaagaattttcagagtggggaggggtggcactggccagggaaggcccacagggctgttttccctgtctgaatggtccattcataaaattgcctcctctttcttctcctgatggcactggccactgcctggtttcccccatctcaggggttcggttctctcaaagctgggggaggaggagctcggtcagctaaaaaggtggtaggagcctccttctccaagtctcatctgttctcctgggctggcatgatggatggcctcgggctgctgggttgtgtgttcagtggcgagccaggatttgccaagggtgtttggctagctcggggactgacacatacggctaactagcgtgggctgtggtgcgctgtcacgcaatgcgtgtcacctgggggcggggagggtgcacgcctgggggaggctgtgacccacctttcatagtggggcttggcaggaccttctccttcaccccagctttgatgcacctataccaggtttgatcagtaaggttggaggaagacaggtgcttctcgagggtccgtttgctcagctgcttcttgctggggacagctgcacctccatatttccttcctgtttctctcgtgtgctcccctctccccactcatttccatttacttctctttcttttccacttctttcttcttcagtctgtctcttattctctctctgtatttttgcgtaattacagacatgacttgttacattcgtgaaaaatcttaagtctgcctggatggtttctgtctagggggcacttgcttgatagaagagaaacaggggcaccttcttctcgcacattcctcactgaccatgcagggacagcctttgagcaaacaagggagagacctctgcagaaggcatttcactcccttgtcagggctgtgcgagaagctggtgacagaactggcccggaatcccagggacacactgtctccccctgctgttagaccacgtctcctcgcaatagggtctgcaccaaacctcctcctgccaacacttccaagaaaatcttcacatccacctatctttaagggttagtttaagctttgagaaatggcacaagagagatttagatgtctaatttcatcctcttgtttagtactttatatttaagtacatgaaaccctaaactgtaaggtatttgtaaaggcagtattggttgaggcatgctctctgctaatcttttctgccttcaggtcactggcttgaagtgtcagtgaccttggaattatttttgcagttgcttttaagccctgtaaagacaccattggaaggttgaggctggcctagaaatggcagctgctgctgctccccgttagcctgaggtcgggtgaggagttcatcacaattactgtttaactttttattttaaaatgattttagacctacagaaaatttgcaaaaatagtgcagagagttcctgtatgctttttacccagctgcacctagcgttaacatcttggataagccatgatacatttatcacaaccaagaaaagaatattggcacactattaataaccacactacagacatttttcagatttcaacagtcttttcattaatgtttcctttttcttttccttttcttttctgcttttttttttgttgttgttgttgagacaaagtttcgctcttgttgctcaggttgcagtgcaatggcatgatcttggctcactgcaacctctgcctcccgggttcagatgattctcctgcctcagcctcctgagtagctgggattacagttgcccatcaccatgcccggctaatttttttgtatttttagtagggatggggtttcaccatgctggcaaggctgatctcgaactcctgacctcaggtgatccacccgcctcggcctcccaaagtgctgggattacaggcgtgagccatcacatctggccttcactaatgtgtttttctatttcaggatgcaatccaggatcccacctggcattcgttgtcatgtctccattagcatcctccagaatatgacagtacctcagtcttttcttgtttttcatgaccttgacatttttgaagagtattggtcacttattttgtagaacacagatggagccaactttttctatctagggccagatagtaaagagttttcgctttgcaggccacatgttctctgttgcaactacccacctttactgttgtggcacagatcagcctcagacaatatgtaaataaatgaacatggctgggtctcggtatgacttcatttatggaaacgggcaaaggttcacatttggtccttgggctgtaatctgccaactcctgttgtgaaagattcctggatttgagtttgcctgatgtgtcctgatgattagattgaggttatgtgtgttggaagaagattcccaaagaggggatgtgcccttctcagagcatcacttaattgcttgcttaaggtggtgttaactgtaaagttaaaagctgctattttttctttgtaattaagaatatttcaggggagctactgtaggattatgcaaatatcctgtttcttttcaaactttcacctgctaattttggcattcatctgtggagcttgcctataatagttatcattgtcatattctaacagtgattttccatttcagtcattccttctccatttattatttggaattcttctgtaaggaagagctgttgttccttcttcctcgcttgtttatttatcaagtatttatgtcagtatggagtcagatatttcttttactttttgggttatgatgatcacaatttttgattgtgtcattgatcacaatttttgattgtgtctaattcttgtgatcaagaattagatgagagcaaaaaatccaaaagtggttgctaagtgttgggctttttttgttctcatcgaattcttgaccaccttcttgatttcatagtcagctttattctaattacaactttgtgggcagccggtgccctaagacctaataggtctgaatttcatgaacttgttaatggcagaaggcagttttattttttggctcaaagcactggtcagatttacaatttcaatctacaacacagctggtgctggttgagttgcagtaagagtgtccgcattagagcgattggagctggtaattggttttcattaattttgtgtgcaagaggagattggtaatgttttctcgtaaatgctaggtcaggtttgcattttgagagtggttccagttattatctctccctatcctcttattccttaagagcttcctttttgttctgttatttgttggggaaggttatttaagagtttaaaaccttgcttcagtgaagagttaaagcgaattgagttttgtaacttttacttgctcatttctagattaaattaaaatgtcagtctaaatgattttgcctcaattggagagccaatcaagacttccaattcaactttcaaaagctatttgacctgttttaaaaaacaaaatgaatatgttgagtcagttttttaaaataggagaaacttctatttctatctacagttgaaattattcttaaggtaactgtatggaagattagtgaaatgattgatgaatgtggcttttatgtttttgtgggttctttagatgatttcagaaacttgtagctctttgctggaagataatggaagaaaaagaaaaatcaagttatatcctgtgactaagaacagagttgtatgcctcactctgaaatatttttaattaactatattttggggcggcgggagatgagtaaattcattcagctcttaaagaaagtcatggaaataatttttctacagtgtcaaggaaaacattgacagacaagaattgtcatttgggatgggcgcagtggctcatgcctgtaatcccagcactttgggaggccgaggcaggtggatcgcctgaggtcaggagttcgagaccagcctggccagcatgatgaaaccctttctctactaaaaatacaaaaattagccgggtgtggtggagcacacctgtagtcccactactcaggaggctgaggcaggagaatcgtttgaacccgggaggcagaggttgcagtgagccaagattgtgccattgcactccagcctgggtgacagagtgagactccatcttaaaaacaaaacaaaacaaaacaaaacaaaacaaaagaaaaagaaaaagaaaacagaaattgtcatttgcccaagatattgttagaacaaaaccaaaccaaaacaacacaaaaaacaacaaccaaaaaataatatggggagtttctgatttgtcttggtacagaattaaaagcctcataaactacagcttaatttccaccctctttaactaaagaagtatgtgctacaaaacactgtagaagttcaggccagtttccactcataatgggaaattgcatgcaaaattcaggcatgctgttcctacttaacttgttcatcttgctccattgcagcactggatgaaaagtgaggattttaatactttaaaaaaatttacaagagaaaatcgtagactttgtcaccatgtgtttatttcactatctgggatgcagcctaaataaagttatgagtcagatgtagacctcttgaagcttgggagcactccgccggccctgccctgccaccacgcacacacaaaatgtgaaggagacaagtaaagagaactgctggtgaaacagctggatgattgcggtggatcctaacatcttgagaagtgaatctgtttgcaaaagctttagcacaaggagagcgatctgcctgaattgcggtagagagtgttgtttgcgcatttgtaaaacgaggcgaatgacccagctgttggccgtaggggcctttgctgtccttcctggggtttgtggtcgctgccgaggatcagcactttcacacgcgaccttacgcattccttgtcatcttgtccttggcgggcctgtcaaaaagaagttattttgaaagcgtatcgctgattgcacattttattccataagtgctcagcgcgtttcatgtaactcctggaggcctctgagataagagtggaaaagtgccctgtgcccttctgagtggtgggtgatctattttcgacttggagactggtgacaaagctgtcttctgtcaggtcagactcgcagggactttcttgttttctgttcctctgttgacagctgtgcctgtgttcagaatggtcatggggtagctggaagatagctctggcatttaaacacctagataggaaggagacgatggaatgtatttttctttgctattttggttagcaagtccctagtagtccatactgagaggggaagaagcagagagacctttgggagggcgggcaggaaaagatgtccaacttcaggtttagaaggcacagagggagttctaccgttggtatatggtataggtatttttaatgcctagaaagggaatggctggaaggaacatgaaaaataaaggttggaattgaggtagccttgggcgggagggtcgggaggtgggttcgggctaacgtgagtaacaagatcagggcaagactttttttttcggtatgctttgtgaaacaaattgaaactaacacactgaaaattgcatttttataatgcttttacataatgcaggatctttgttttaaaagcacagtgacgcaggctgacatgataggagaacttttaagagaccctttaaatcctcacaggtatttaacgtaagcctgagcgtatagctcggatggggatcagtttaaatgctatatgtattcccagcatcttgcatccacattgaatagctgtggagctttgacaagttctttaatctcacggaccttacttttctcatccgcaaaatggagcccagtccattcctgcttcaaagggctcttgtgagggcccaaggtacagcgctacatgacaatgtcgtcatgactctttaaatatcctatgaaacctgtgatagaaacttgggctctcactcccagatcttactttccttactctttattattactatttatttatagtagctagtgactaatgatgaatgattcttccgcttggcccccctatagttaaggtcatggcttccttcaagaatctgatggaagtatgagcctccttcccccgatcccacccccacacaatttagcacagaatgccagtaattcagtctgaagcccagttaaaactctctgattttaatgtgctttttaaaaatggaaattacacatggtagcgcacgcctgtagtcccagctacttgggaggctgagacgggaaggttgcttgagcccaggagttcaaaggctgcagtgagctaggatcccaccactgcatccagcctaggtgatggagccagatgctgtctctaaaaaaaaataataaaatataaatggaaattacaattttatctaagagatatttttacagatgtctggaatttggaaatttctgcttataggcatttctatccatcatttatttttacagtaaaagaaataggccgggtgcagtgactcatgcctgtaatcctagcactttgggaggctgaggcaggcagatcatttgaggtcaggagttcgagaccagcctgaccaacacggtgaaaccccgcctctactaaaaatataaaaattagccgggtgtggtggtgcatgcctgtagtcccagctactcgagaggctgaggcaggagaattgcttgaacccaggaggcggaggttgcagtgagccaagatcatgccactgcactacagcctgggtaacagagcgagactgtctcaaaaagaaaaaaaaaaaaaaagaaaaaatttgtgttccttgtataagcacagtgcttttctagtactgtcccagttcagctgcctatggcaagattgtaaactatgaaaagtaagaatgtaaattaaacacagtgaaaagctgagtcatatggtaatgtctagaaaagtagtaagatactaaaagtatgtaagtcaaagaggcccaaattatattttcctttccatccttaaaatgtcatagctaactagagggttaacattttttaagtgctgagtccaatcaatgtgatttaaatcatccatgatatattcatagctgaatgattaagttggatgatgtgacaaaacacttaacttgtatttatggtcattgatgattttacgcattattagagagaagcatagttacacccaattaaatatagacatctgatccagacatcagttctgtaatttcatgggaaaaagtaaatctaaacgagcaaaaaatgtctgggtattaactccagtctgatggtattacaagttttcccagttaattagtaacacatattatagaacaaatgtttgaaacagaaatctcgtgattttgcgtaacaaaccaggagttgagctggaagtctctgttctcccactgcgttgctgtgtgaccttgggcaagtcacttgaccattgtccacctgtgatacaggggatgtgactacatatctcgaatgagaaaagacttcttcccatgttaacatgttttgactttacatcaattgtgtcattgctgcttttttaaaaatgttgcatcaacatttacgatacatataaaaaaggtacacaaattttaagtgcatagctcattgaatgtttactcttctaaccagctcctagattaagaaataaaacatcaacatcctagaagtcctccttgtccttcctctgggtcatgagtgctactcctaaatggttttgtgtgtgtgtgtgtgtgtgtgtgtgtgtgtgtgtgtgtgtatgtgtgtgtatgtgttttaaaaaggagagagagaaataatgagttgataatttttagaaatttggtggtctaacaaattaaaaatcaaatattattcatttggaatcctaataatccagtccacaattccttatctgcagttttgaaatacaaatagctctgaaaacagagaggtttttcttaaagttttgagcaaaagtatttggcaacaaaatctgacttgataggatgagaggctgtttgcagtctttatttttaatctcacatagtgtgactatttatgcattttactcaagaaatgttcatgtgtttaatgctatggttctggcctggactctactgggttcaaagtctagcacatgcatcatacttgtttgtttttcaaaataaaaaagattctaaatttcaccaaatttggccctaaggatttcggattcataccacaacataattgtttacacgttgatgtcccaacatttttactgcttagatttgtatgatttttatctgaaaagtaaagcagatatagttctagttaactgcttggtgcattatcaaacatccttcttccaatcctgcatttaaaaaaaaagcactgttactttgcaataattttagatttactaaaaaagctacaaatcaagcacatagagtttccctaacttcccctaatgtcaataccttacataaccatggtacatttttcaaaactaaaacattattaatgttggtacaatactattaacaaactatggacattattcagatttcttcagttttcccaccaatgtcctttttctgtttcatgatcctacccaggatccaacatggcatttagttatcatttcttcttagtcttccccagcctataatagcttctctgtctttcctgtttttttttttaatctcctttacagttttgaagaataataggatcttatagaatggcttttaggcatttttttgtttgtttgcatgtattttaaagtttttaaaaattaaactttgtattttgaaataattctacattcacctgctgttgtatgaaataatatagaaggaccctgtgtaccctttattccgtttcccccaatggcaacatcttgaaaaccatcacctgatatcataaccaggatattgacattgatagaatcaagatcagtagatcctccaaccaactcaactcttgcactcccttggttcagcacgtgctgactggggcctcccatgagtcaggctctgctggaggcctggggacacaggggtgagtgagagacaaaacctgccctcatggagcttagcttctaggaaacagacatagcaagtaaacacatgcacaaacagtataatgtcagctaatgagtgctatgaggaaaaatcaatcagactaaggactcagagaaagttggaaatccatgggccagccttccctttcagctctattggccggagctcaggggcaggtgcctgcttttgatgggagaaaatatcagtaacagtttaattggtgttttacagttccatcatgtataactattttatatctttgttggaaatccacacggttgttctgtgctggtagtgcgggtctttaaaaatctagggagtttgtttgttgggaaattccgtggaaagccttgtttccgatgcttctagtcccacagtgtagagtccctcctgttggtgatggcattttgtacatttagtgacaattggcatagagtataaagccttttacaagtctaaagtagcagtgtttctatttcttggtattcttcatatcatcaagaagctgtgacaaaatcagagaggtagaagccagggaagattctggattgcatatatttagatgggcttttcatctgattgtcaatttgtgtcactcataaaagagatatcttaattttaagtgcttccagaaaatgggaatgaaacaatgcttaaatagggccttcagatcaatttatggaatgatatcagttatcttaaaaaccctggaaatgagtgatttaaaataaacaactatggcctttttttattgtggttaaatagatacataacctaactatttttaattgtacaatttgactaggcatggtggcacacacctgtaatcccagcactttgggaagctgaggctggaggattgcttgacgctgggagttttagaccagcctgggcaacacagtgagccctcctgtctactaaaaaaatttaaattagctgggtgtggtggtgtgtgcctgtagttccagctacttgagaggctgaggcaggaggatcgcttaagcctaggaatttgaggttgcagtgagctgtgatagtgccactgcattccaggttgtgcaatagagcaagaccctgtctcaaaaaaaaacaaaaaaacaaaacctgtacaattcactgacattaaataggttcacaaagttgtttaaccacccacactatttccttaactttttcatcacccaaacagaaactctctacccattaaacaaaactccccatgtccctcttcccccagctcctgctaacctctaggctactttctgtctctatgaatttgcctattttaggtatctcatataagtaaaaccatacaatatttgtcctttttgtctggcttatttcatttagcatcgtgttttcaaggatcattcatactgtagcatgtatcaaaattgtattcctttttatggctgaataaaatatactttgtaagtacaatatacgtatatatcacattttagttatccattcatctgttgatggccagaagcatcgttttcaccttttggctattgtgaataatgcttccatgaatgttggtgtacaaatatttgagtccttgctggacttgaaagacctgagtcaatacttttgggcatatacctaggaacagaattgctggatcttatgtgttatggactgaatgtttatgtcccctcaaaattcatatgttgagatactaaccccccatgtgatggtattaggagatgaggtctttgggaggctgtggagccctcttgaatgggattagtatccttatgagaagagacacgaaagagcttgctcttgctcttgctctctacccataccatgtgaggatagtaggagaatacagtcccaagttagaaggagtgctttcaccagacaccagatctgccagtgccctgatcttggacttcccagccttcagaactgtaagaagtaaatgtgcgtgttcaagcaacctggtctatggcaatttgttatagcacctcgaattgactaagaaaatatgataattctgtggttagcttttgaggaactgccaaactgtttcccacagtggctgaaccattttatgttcccaccagcaatgcaagaggattccaatatctctacattctcaaacacacttgttattttgtttgtttttattatggccatcctagtaggtgtgaagtagtatctcattgtagttttgatttgcattgctctaatgaccaatgaggttgagcatcttttcatgtgcttattggacacttgtatatcttctttagagaaatatctgttcaagtcctttacctgtttttgaattgaattttttgttgttgttgaactgtagaatttctttatgtattcagaatataaccctttatcaagcatatgatttgcatatattttcttccactctgtgtgttgtctttttactctcttgatagtgtcctttaatgcatgaaagtttttaatttttatgaacttcaatttatttcttttttcttttattgcctgcgccttttgtgtcatacccaagaagtcattgccaaatccaatgttacgaagcattccccatatgttttcttctaagaattttatcgtgtaaactgtagtttataatctcaagttctggtctttgattcctttttgcatattgtgtaaggatccaacttcattattttgcatgtggatacccagttttcccagcaccatttgttgaaaagactgtgctttccccattgaatggccttggtacacctgttgaaaattgatcatatatgtaaagatttttttttctgggttctctattgtattctactgctctatgtctgtccttatgccagtaccacactcttttgattactgtagctttgtagttagttttgaaatcaggaggtatacatttcccaactttgttcctctttttcaagatttctttggctatttgggatttgtcccttaagattccatgtgaagtttaggataaatttttctatttctgaaaataatgttattgggattttgataggaattacattcaatttgtaggtcacttacaatattaagtctaccaatccatgaacatggaatgtctttccacttattttatcttctttgagtttattcagcaatgctttgtagttttcagtgtagaagcctttcatctccttgctttattcctagtttattctttttgatgctattataaatgaaattgttttcataattttctttatggattgttaattactagtgtgtaaaaatgcaactgattttatgagttgatattgtatcctgcatctttgctatttgtttatgagctataaccattgtgtgtgtgtgtgtaacttgagggttttctacatataaaaccatgtcatttgcaaacagaaatagtttgacttcttccttctcaatttgaatgcttttcatttctttgtcttgcctaattgccctgtttagaacttctagtattatgttgaatagaagtggagaaagcaagcattcttatcttgcttctggtattaggagaaaacttgcagttttttgttttgttttgttttgttttaccattgagtatgatgttagctgtaggtttgttgtatctaacctttatcatgctgaggaagttttttcttccattcctagtttattgagtgttattgtcataaaaaggtgttgaattttgtcaaatgcttttttgacatcgattagatgctcatgaggttttcctttttattttgttaatgtggtatattacattgactaatttttttatattgaactatctttgcattctgtgaatgaatcccacttggtcatagtgtataattctttaaatatgctgctgaatttggtttgcaagtattttgttgaggatttttgcatcatattcataatggatgttgttctatcatttttcttttcttgtactgtttttgtcatgctttggtatcaggattatattagcctcatagaatatgtaggaaatgttttcttctcatcaaatttttggaagagtttgagaaagattggtgttaattcttctttaaatgtttggtagaatttaccagtgaagctatctggtccagggattttctttgttaggaggtttttgattactgattcaatctccttatttgttatcggtcttttcatattttctacttcttcatgggtcagttttggtagattgtatctttctaggcattcgtccatttcaaacgtgaccattctaaactaaactgttggcaaatttgttactactgtctgttttattgaattactttcttgtcttagagtgaaactctcattttaaatgacatgttatttctttccaaggtaaagtaccaaggaacatgaggcttttgcttgtatatatgattgttaatgtgtattcaatttttgccaaatatttaataaaatattttactatatgtcttttgactcattaaaagtgggaaatctcatttgtgtataagattatcaggctatataaaaatgattccaacataccagagacatagtttagattacagggcctctgtggagtttttggtaaaatatcattattgactcacaattatcctcactcttggtaaactgactgcttttatatggtccttagcccatttaatttgtgtagcagaatgaaccagtgttatatttggctcaaatttaaatttctccattttcttatcagacactgggtcagagagagctaagagaagcaaccagcatcagtggggcacaagagctttgtgactttcctgtgtgcttctacctggtcttcaggatgggtgtttcctggtagacagtcattcatgcaacaagcatttgctgccctctaccaagcaccgtcttaaccataggtatcccaaccatgcagaacacagaagcgcacaaagcagacaactccctgtgctttgggagaaccaatgaacccaatgaaccgaatgaaaccaaagccaaaaggcagccttgatcccccaaaagaaattgattctgtaacccaaattgtaaagtttagagctttgtatttttgtcctattaaagaactgaattcattctcaggcactgccatctttgttggggctgggctagctcttatgtcaaaagcttgagcagccacttttaagaggaaggggactacgatgatgcagtcagtaaatttgtgcatggccttggaaaccttccagaattgtaagtgaaagctgatattctctccacagaagaaaatatagcaaaatgggaatctaaccatttcattggaacaggagattggactcaagttactaatacaggaaaaggcaagtagagaagggttgaggtttgaattctgagcagttctgcttgaggtgcagagctgatgatggtttgggttaagatagcaatttccaaaccacagccctcttgctaacagcaaactggattataccataagaaggcaactagttcagttagaacataccttagtattacattttaatcagacaccacaaggagctgactgacgtttaactccagagttgtaacaattttgaattgttgaattcaaaattcaacaattttgaattttgcccaaatttaggaaagaattggagtaagtcaggctagtggcctcctatagcaagtcaggaaagatatactagcagagtatagtgtcatgtctgtggttcaaaggttgtgtccttacctcttgagttacattttgattgacagggcaaaactgaatttttcagatattgtcacttcaaaggattcttaaaactctgccacaggattgatttttgttacgatatcgtcaggcagtgagtgagatgacatcctgaggtgctgaaatccttaagttttctggcccctgctgagtggatgacccaaagacccctgcagtttaactgaggtgtttattcatctgcagactggaagccaaggattggaaatttaacatgaaataaataattaaacctcacttccacaggtgcagagggcataaataatctaactgcatgctgcccaggcattccatagcatgggccatttagatttaatgcccaggcactcacttgtaactgaatatgtcggaaggtggctcctgcctgggatgggaacgggtgctatttcagagcagtgtgtttgtctgtctgctggaaagctgcctccaccctcagactcttctggagaccctttgctgtcttggactccaggggaaatgtgtccgccccttgcccagcccagagtacgaaatctacaaccaactcctcttctggttaaacaaaggaggtgatgtattgaagagaggcccaagagaaatgattcatttcatcagaaatgtttggagaaacagatgagttcgctgatgggagtggacttcacacactttgttctcagagtcatgagtttgaacctgagatcatttgagcattgggaagtggctgaaagtgggtgtcattttctgctttaacagcaaatcttgtgacaggcactgagaggtagcaatccattttctggtgaccaagggtaaggatgcaactactagttctaattatgtctgcatcacttacatggctttgcacacagtacaaatgtaataaaaatttgttaaacgagtcactgaaagaacactgatgcattgtgatattttgttcttcctaatagtggtcttgcctgagccagtgtcactcacagtggaggtccctggaccagcagcatcagcatctacttaggaatgcaaattctcaggccctgttccagagccaatcagtctccttagtgggcccaggaatctgtttttaacaaagcctctggtgattctgatgcctgcggaagcgtgagccacactgggctagagtttctttggccagggaagtgatttaagaattgtacgcatccttatttcctctcctcagtaggaagtcaccatagctggttgcaagagaatcgcattttaaatctttagatgtacatgtccccaaccctactcccccaggacttcttacccaggactcagctagtcccctggcttttttttctctccagatctcatgtttccagattctgtgctcagtcacttcttgggaaatacagatggggttgggagggaggcatcctcccctttgctgattgctggaggggattgagctgtcacgtcagacctctgctgaatgcccactgtgtgcaatgcctgcaccacagtgagcagtgcacagtcctcatccccaggacctcagaaactccaagggtggcagaccttggaagtgatgaaggtggggatgaagtggcactcactgggctggatctaggagcacccagatgggccaagcgcaaccgtgggctggggtggagtaggagggcttcctggaggaagtactgcctgggccatggctgatagggcaagtgagtggcagcagggtaaagagagggagagccaaagggaatttgaggctgaaggagcagcacagcttaaagcacactctggagagggtttcgtccaactctgggggaccttttttgctttttatgttactagatatagtaaagtctgcaactcttacttttacagcttgatgaattctcaaatgtgtgctcatccctgttaccaccacacagaccaaaagactggagatttccagcctcccaaaagggagcccatccacagctccctgccaccaaaggcaacccccattcttacctctgtcatcatagattagttttgttggggacttttttagactatccacttcttaaggaaaaaaacttatcctgtagagccaaagatggctcaggcttgatatgactttgagttatgtgttttgtttggtctatgcagaattttttttttaagctcattgctcagatttaaaagttgggggatttcacacaacaaaagcccaacaacactgggctcgtgaacctcagcagcagtgctgggctgtagtcaggtaggaaccgtccccctgaagatgggtgtccatgcgtcagtatccctggctgttccccactgctcactcctagccagctgcacttttgttacttgcctggcccacttgggcttggcccatgagttttcaatccctgcctttaaatatggttttgtttcttagtttggggcctcctgcatgactgagggtgcttagtaatttccttggttcactcttcagtgtgtattgagcactaactatgagccaggcccatgccaagagctgggatacagaggtgtgcccaggcagagggattgaggtattgtttgttgtttgccatgcaggcagccagaaatgtggcacagtcctacctgcatgagttcacttctcaccacctccttggatgccacccatgctggttgtttcctggcccctgagcccaccttgtttcatgatcatcacacatccactgtcactatcccttcatttcctccctgtctggtcctcatccttccctcaagcttttgctcaagtctcacctcttccaagaagtcttcactgaccagccctttctcttgtgatgcctccctcccctgattttatcagcgtattccccacaccacaatcccatcaattctcaattatttattccctcacattgaagaaacaggggccttgtttctttttttttttcttttttttttttgagactgagtctcactctgtcgcccgggctggagtgcagtggtgcgatgtcggctcactgcaagctccacctcccggcttcacgccattctcctgcctcagcctcccgagtagctgggactacaggcgcccaccaacacgcccggctaatttttttgtatttttagtagagacggggttttactgtgttagccaggatagtctcgatctcctgacctcatgatccgcccacctcggcctcccaaagtgctgggattacaggcgtgagccaccgcgcccggcccttgtttcttatattagttatcacaggccctatgggcaaagacttcccctatacttcccagcattgctccagcatgccctgcacagttctgagcttatggcagatacccaggacacacaggaggtgggctgggaagggcaggggagcaccggaaaaagaggctgtgatggcggcccctggggaggccagaaggagagcaccaggagttgccctcgctggcaggagcctggcaggaaccctgcctgtccttgagggcccatcttccttgcaagagtgttgacaccctgtgaggagggtgcagaaactccagccacagggccacagacgttctggacagtgtcatgtgaggtggcattggagcttctcctcttacagcctgacagagtgtcccttggggtggcaggttcattgaagacagcgtggaactggatacagaaggtgtcattttgatggccattccttcagctttatgccatgctccatagacagcctagggtacccctctctgtcccacttttagttcctcagtgatacagattgctaaaggcaactcaattgcaaatagccccgcaccatgtgacactgcctccttgaaaagtacttcagatgctggcagaggatggtgacctttcagtggtatatgcctgctctcagcccagccagacagaccactgccacagaggtgggagaggcaagaagagcctttaacttaagggcacttggcaaagggctgtctcatttgctagggttctgttatatgtcacttggtgtgcaagcttccaagaactacttggcttcctgacagggaacatgatagaatgtcaggacctaagctaatgtaaaatatgctttggccagccaagtcatgcacaggcaatgcaagaagccattggtcgttcacacgtctgcgccatgttagacgggggctccactgatggacttaacctttccagacccacgtgatgatggagatccggcaggcagtggcttcttactcaaggcatgctgattttgaaaagtatgagggcatctttaaaaaaaaaaagtgcattctttttttttttttttttcctgagacggagtcttactcttgctctgtctcccaggctggagtgcagtggtgcaatctcggctcactgcaatgtttgcctcctcctgggttcaagtgattctcatgcctgagtctcccaaatagctgagattacaggcgctgaccaccacgcctggctaatttttgtatttttagtagagatggggtttcaccatgttggtcaagctagttttgaactcctgacctcagatgatctgcctacctcagccacaaaaagtgctgagattacaggtgtgagccactgcacacagccgtttaaaaaaacaaaacaacaacaaaaaacaaaaaaaaccaaacctgcattcttaaagggtacttgtttcctgtcgctcttttttcctttatacggtggtccccccttatccatggaggatatgttccaagaccctcagtggatacctgaaactgcaaatagtactgaaccctatatatatatactatgtttttttcctatacataacatgcctatgataaggtttaatttataaattaggcacagtactcttgtgcgttggggccattatgaagcgaaataaggatgtcttgatcacacgcactgccgtatcatcaccgtttatcctatcattgaggtggctactaaatgacttgcgggtgggaagtatagacagcatgtatatgctggacaaaaaggtgattcacgtcccgggtggacagagcaggatggcccaagacttcatcagactactcagatcagtgtgtaatttaaaacttacgaattatttatttctggaattttccatgtaatatttttggaccacgcttgactgtgggtaactgaaagtttggaaagcgaaactgtgggtaaggggggactactgtattcccctcttcctgtttttcacctctcccatgcctccccctagtccctcccatttctgtgtctttgtgtttatctgttgagcctttggcatgaacaccagacaaggttggctgggtttataggtgctacattttttcacttgggcgcttcagatttagataataggatacagagacctagaggtttcatccaagtttcagccttgggccagttagggagtgtggaattggcaaccttttatgactgttaagcaaaatctttgcagaggagctgtaccaattaagaaatccttggctgccaacaggaaccccaacagtggcttaaaccagagggacatttctcatctcaacatgaaacctggaggcagaggcctaggtttggtttggtggctcaacagggtctttagggacccaaagtctttccatcccctaccttgccacgttccatgatgtttttgttcttatgcctatggcctcctcttcacaggacagtgacagaggccccaggattacctacttacatgccagcaaccaaagcaggaaatgggatgggcaacaaataaaaaccctctttgggccaggcacggtggctcacccctgtcatcctagcactttgggaggctgaggcgggcggatcacctgaggtcaggagttcaagaccagtctggccaacatggtgaaagcctgtctctactaaaataaaaaaattagccagccatgatagcgggtgcctgtaatcccagctacttgggaggctgagacgggagaatcgcttgaacccgggagatggaggttgcagtgagccgagttcatgccactgcattccagcctgggtggctgagaaagactccgtctcaaaaaaacaaaacaaagcaaacaaacaaacaaaaacctctctttgcttctgccttatctgggaggggaaattttcagactcattgcaaaggaaatgtcatttaaatgtgaaaactgatgcacagagctgagtcattttgggatacctgtgtgagccgggggttccattttcctggtgacccttctcaactccgttcccagtggttctttctcaaaattacagattgtgaagaatttttttttttcctcctagtttcttccagcctggagttcacagtggggcttacttctcacctggtcagccaaagcttaactgaaaatctccaagagttcctgtctttagaaacccataaagtccggtcctactccctggtactgattctcctttttttctgaatggtactcgcatcagcctggaccacggggaacatgctgttcccatcatttaccccgtgtatgagccggagatttcactgttagtgttaagttacagtgccttgctggttgggagcttgccttttgaaaagttcaggtccagccctcctttgccttatcttgggaaatgactttctgctaaaataatttcggtttgtacatatgcatgtccatgcacacaccccagctccacaccatccagtgggaaagggagtcagggatttcatggtagctgtcattttgatgaatgtccctgtgtccacccacagaggccgtgacattcctgcctttcccacttgataatctgaaaatctcccaagcctgattgccttgctataggcctgcaacctggaatgctgcataggttctgagtttcaatccccagggtccgcactggccaggatctgtaagagcctgtgggcttgatgctgataaggcagagagctaacgggggattatcagagagggagagtgccagacaaggtgcattcctctggggatagagcagcaggactttgggagctgggacaattgtgtgaagcaggacgtgattgcgtggtcttgtttcagccagcctcagctatccccttttatctgcccccagaggcactgtgctttttaggcctcctcaccttccctctgaaatgtgctccccaatgtgcccacctcttctttctgttttccagcctctgctgggcaaaagtgggaagttgctctcaagtgttaaacgtgttcactctcaccaagtggaagattttacattagaattcaatcattctgtttacttcctttaaagtcgagagcgtatcagctgagtgtggtggctcacacctgtaatcccaacattttgctaggcctaggtgggaggatcacctgagggcaggagttcaaaagtgagacccccccatctctaccaaacaaacaaacaaacaaacaaatttgctgagtgagatggtacacacctgtagtcccagctagtctggaggctgaggcaggaagattacttgagcccaggagtttggggctgtaatgggctcggatggcgaccgtgcactgcagcccggggcgacacaatgaggccctgtctctaaaaaatacataaatgaagttgaaagcatgtgaagtttatgattggctttgtgatcggaaggatgtgtcatgctttcccctgggtgttgggaaccttctgaaagaactgctgtcggaattcagggtcttctgtgcctgtccacccactagccctcatgggcgtaatgcagagatctcagaagggagagctctggatccagactgcttatgttggaatcatcttccacccacttactcactgtgtgccctttggacagttatttaaccactctgcacctcagtttcttcatctgtaaaatggaaattatggtacataccacatatgattgttagaaggagtcaatgagttaacctttaagtacttaaaatggtatctggcaattagtgagcaccatgtaagtgtttgcttaataaatattaagagtttggggtttggggtgggttttttttcttgtttttttttttgtttttttttttggttggcttaatacctttctaactgaaatttttgttgagataattgtagattcagatgcacttgtaggaaataatttaggccaggtatggtggctcatgcctgcaataaagcctcactttgggaggccaaggcgggtggatcacctgaggtcaggagttcgagaccagcctggtcaacatggtgaaacaccatctctactaaaaatacaaaaaatgagccaggcatggtggcaggcacctgtaattccagctactcgggaggctgaggcaggacaatcgcttgaccccaggaggcggaggttgcagtgagctcagattgcgccattgcactctagcctggacaacaacggtgaaactctgtctcaaaaaaaaaaaagaaagaaagaaagaaagaatttagaatgtatcagttaaaaataaaactaaaaaaggaaataatgatgagatttcccatgtaccatttatccagttcccccagtgataacagtttgcaaaactgtagaagagtatcacagccaggatattaacattgttacaatctacctctcttatttatcttataaaagatttcccattttacttctactcctttgtatgtgtgtatatatttagccctatacaattttatcacacatgtaggttcatgtttccagcactacagtcgagatactaaatagttccatcacaaggatctcttgctttgccttttacaaccacatccacctcccgccctttgacgaaacacctggcagggactaatctgttctccatttctaaaattttgtcgtttttaaaatgttatataaatgaaatcaggccaggcatggtggctcatgcctataatcccagcattttgggaggccacggtgggtggatcacttgaggccaggagttcgagaccagcctggccaatatggcgaaacaccatctctcctaaaaatacaaaaattagccagttgtggtggtgtgcacctgtagtcccagctcctcaggaggctgaggcaggagaatcacttgaaccagcaaagtggaggttgcagtaagctgagatcacactaccacactccagcctgggcaacaaagcaagactctgtctcaaaaaataaaataaaataaaagcaataatacagtgtgtaaccttttgggacaagcctttccactcagcataatttcctggagatttatctaagtttttgagtgtatcaatggtgcattatttttccttgctgaatagtattccagggtatatatgtaccacagtttgtttaaccattcacctattgaaggatatctggcatctttccagtttttggctattacaaagaaagctgctatgaacatttgtgtacaggtttttgtgtgaacataagttttcatttctctgggaaaaatgcctaaaatgcctaagagtgcaattgctgggttatatggtaattacatgtttaggtttactactttaataattataaaaaacactttgttatttaaatttgtacctcccaacagtaaatggatgttccactttttgacttgcagctaacattgtattagtatttgttaaataaattaaaacagaccactggcttttacaatgtatccaggactgtgtaagaggaaagggagaggaggggattcagatggtttggtgacagttcttgtctttaagacatgtgtcatcttagctctgggaattgagtggctggaaagaagagccattagactgtgtgcaggcaaattatagaaggcctgaaacagcccagaggacagccatgtgggaggtgggagatgaggacagagtggaggtttggagaagccttgtcaatgttggtgccaccgatggctgagtttggaaattttatggtcttttgtatttgacaaaaaattggaaatatttgaatttgaagaaaagccattgatttttcatggaatattatatgtttttggttaaaggtaaggattattgcagtgataaatccctttgaaagggtatacttttcttacaagaagaaaacagaagcatggccttgctggaaaatggctggttttagtgactcaccattgtgaacaaaaagttcgattgttggccaagtcacagagtggttttcccggcctccagcacgatgctggttctttctgtggattgggtcattttgatggagtgcagtgaaagttcacataatgtgtttgacgcctggaacagataatttttcacattactgtcctctatatgacaacattattttcaataaaaaccatgcagtcagcaataattttcttgatttttttcttcagtttgtaaacaatgaatgattgaagaagaatggatataagttttaaatatactactcagatccaataaaatatttcacatctgaattagcatctgatttttcatttttataatcactgtgctatcactgtttataccaaatctgttttaaccagtgaatcgataatactgcagggattggagatacaaactgtgttggaaatggaattgaaaatgaattgattctaaactagtatgaatttattttctaaatctgtgtgtgtaggtgagtctggatttgcatgagcaactacaaatccaagagttctccaaataaatttcatgtaaataccatgcttatgaaagcgtaagtaatacacatatgctaatttgaaacttacatatatattaatctcaacagtggttgcaataattgtttggaacctaaaccaacaaaacaattgtttttgtgaaggagtagcttctcattgacattgtttagactactgacgcttggccggatgcagtggctcatgcttctaatcccagcactttgggaggccaaggtgggtggatcacttgaggtcaggagtttgagaccatcctggccaacatggtgaaacccccatctctactaaaaatacaaaaattggccgggtgtgatggcagagtcttgtaatcccagctacttgggaggctgaggtgggagaatcgcttgacctgggaggtggcgtttgcagtgagccagaatcacaccactgtactccagcctgggtgacagagtgagactccatctcaaaaaaaaaaagaaaaaataaaagaactgctgatgcagatgacttttagtagttttattcctgttgtaaaaatctctagagacaacatcctaccttattgcctgcactggggtagcagtttggttgtgtagctgtgtgactttgagcaagttgccttcatagctatagtcatcttccttatctgcaaaatggtaaagctttctgtgggttaataatatgatccacacaaagtgtctggagtggcattggcatacaataggttcttaagaaatgtgagttgtcttcacttctccacctggaatgggcaatatctgtgtgtctctgggacagccctggaccttgaggttggagctcagcgtgaccagtcacagagctgcctcccttttcattctctttctgatatccgccaggaaatgcaacggttctgtttaagcagcattcattgagtgactacattgaactccaaaggaagcttgaataaattctagagtttctttgctgtgtccatgcaagcttggatgggagagctattctggtctctcttgggatgaaagggtgggaaatttcaggacggagtggtgggctgtctgtctggagggtgaacctcaaaaccaatggcgattctccttggcttgagggtaaagaggctctgcagctgtttctcctaatcaaagagggttggttgtagtcaggccatttacaaatcactttccttttctttctctgtcttggtcttgcctcctcctcatactgataattgccaaagaatgtggtccaggcctttttgtggcttttgtgagccttttatagcagtaagaaggaattctcggtattctcatcgtgtataaaagatcaagctattcttatgcatgacatagctcatgttgaacgtggaaaaacgcttaaatgacccagggaggctctaggatggctactttacatagcaattgtgtgctgtaaaatgaacctgttgcattttaaaggggctaaagagaattcttaattttgtacagtttaatctgccaagtgataaggctttcttttccctttttaaaggaaaatctatttagtgatggctatagggaatattgggaaggaagctcatatttttaatttaaacaattagaagtgtattagaaaatctatcctagaaaaacatctcatgttgtaaataagctcagatgtagattgttggatataaaatggagcttaagattttatttttgctaacctgatattccagagtgtatattgtatttttacaatattggctgcatagccaattcatttcaactggaaaatacatcaaaaagcatataagttaatcaagatcaagctaaaatacactttaaaaaaatgttttttctggttttattgcctgccattctgctgatttatttcctagagaaagttaaacatttttaaaacacagaatgaatggttttaaaaggcaaagagcatagatctgaagccttaaaaatattactcagctataaaaaggagtgaaatcctgccatttgcaataacatgaatgaaactggaagacattatttgtgttaagtgaaataaggtaggcacagaaagacaaattttgcatgttttcactcatatgtgggagctaaaaattaaaacaactgaactcatagagagtaaaatgatggttaccagaggctgggaagagagggtagaaagtggggatggttaatgggtacaaaatatagtaagatagaatgaataagacccagtattggatagtgccgcgggatgacgatagtcaacaataacttattgtacatttaaaaataaccagaagagtggaattgtaatgttcctaacacaaataaatgacaaatgcatgagttacctgatatgattattatatgttgtacctctgtgtcaagacaccacatgtactccacaaagaggtacacctattatgtacctataacaataaaaaattaaagaaaacatatgaagtaaacactcggttataaaaaggttggatgaatgagcattggcagggctagcttcactggcaggtgatctgtgctgtcacatagggccccatgcttaaaggggctctgtgcttgggcgtgatgctctggtaatcaccattttgaaattcttactaatttctgaacaagggccccacattttcattttgcagtgtgccctgcaaattatgagctggtcctatatatcagctacccaataattcagctcaaactagctttggacttttgaattttaatcctaatcttaactaacgtttatcagattgtttttttctgtatgtgaatttgtgaggaccagcgtgatgaactttcatgtagataatttttttcaactattttcaaagggctaagtattagataagtggtgtttttaaacatttttatcttgtttcatacagtataaagctaaatcccacttatttactagtttctggtaaaatacgtaggttctatatatttttgctagataaaaacaggtgaaataaaaccttatttctcaaattattaataaagtattaatagtggctattgctgaaagctgggatttcaaatgattttcactttctaagttttatagctctgagttcaagtttttacaacaaggcggaattatttttgtatttcaggggaaacaagaaacaataaagaattttttgaaagtctgttcattgtttcccattctggaaggtggtgttggggcattgaggatcctggggttcctattcctgagggcaaccacagaaaatttagtgaagttcaagaaatggcttggaatgattgagagtgtggctggggtggcaggactgtggcagaaacgtccagtggggtttgtaaacttaggaataatctgggcctggcgtccaatttcacgaggcagtgatgcaattttattttattttgagtccttggctatcaattgtagtgtgtctttgtttctcatttctttttctttttaaatgttctcctcacctcatccctcaatagcaggtcagacgtgttgctgtgagccaaagctgcatgttgcctttgaaccaggacagagctatcctgatgcagggtcaggttcaatgtgagacaaacagctttggattctaaacccttgttgacatctcagccccgctgtacaatgtggcatggctaatgccctcctgctgcttgtgaaatggccaggatttaaatgctgggatcgggagtcaaagacccaggggatgaccctggcattttgatgctggacgcttgcctaggagagggcaaccccgcaggcatgctgggaacactggagcagacagcaggccattctgggagcagcccacactggccagcattgctgcctgtctgttagagggagtgtctgccctgaccctgggaggagggaccatctcttacttttctgtctgtaggcagaaatgttttcactaaaggccctggcacatcttaaacatgattttaaagatcagtgataatttcttttttttttttttttttaattgggatgggatcttgctttgttgcccaggctggagtgcagtgttatgatcgtagctcactgcagccttgaactcctgagctcaggtgatcctcccttctcagccttctgagtagctgagactacaggcgtgtgccaccatgcctggctattttgtttttttaattttgtagagatggggggtctcattttgttgccaggcgggtctcaaactcctggactcaagcaattctcccaccttggcctcccaaagttgggattacaggcatgagcagtggtgcccagcctcaattatgatttcaaaaatcataaagttcaactaaaaaagtcagaacccattagagatgaacagaatgtttgtttttttaaaacctttgtcccttggagccccagggactccaagacatgtgccctcctacacgtcctccagaccagctttgctcacatcagcgttctgttttaggctttcacctagtatttcatatgaagaaagagttcatgtctaaaaagcagtaccactgaattcgatcaacttttttttatcatgctatttgatccttagtgtccaaggtccctttagtgctgacgagtgaaaacagataccaatagttggactatgatcatattgggcagtttcctttgtatttgaggtgggttttcgcgcaacaagctggtggtcatgctgaactggatattccgcaataatctggaaatgtagccaagactgcaaattatgatgacaataatcagacacttctgtagcatatactgtgtgctcgcacttgcctgagcacttcccatgtgattgctatttaatcctctcaacagccaggaggtaggccctgctgccagccccatctcatggtgcctccggttctcaggttggagaacaactgaatattggggctgccccactgggcctcctcagagagccacttttccatcttcagttctctgcctcccagttaaactcccagccccagtaggaaggactgaggcgggagaaggagctcacagtttggagaatgcagttttcttggagagaagctggtccttccctcccccttcccctttgggggcaaatgatggggcttcctttttccaaagttttctgtgcagatagggcaccctggcatccagttttccagctagacacgtgcgtcatcaggaacagctgcctgccctgggctcctggcacaggagaaggagaagtgaggtcaggaacccttatcccaaagacaggcttcatgtgagtcccaggctctggacttgtggagccgggcaggtgacgtgaaggccacagttggctgggactgcttttgcttggggaaccagaaggctcctacatgtggaggttgtcatgagacacacccctagaagggaatccggatttctccagggtcatctagaggagtggtttgggaggaggctcttgttactgtcccccagcccaagaccatggaggacttgtggggtgcgtgtgtgattagactccagccgggcgattgtggccacccctatccagtggtgcaggaaagaggccaggaaaaccagcctggctaacatggtgaaatcccgtctctactaaaaatacaaaaattagctgggcgtggtggtgggcacctgtaatcccagctgctcgggaggctgagataggagaattgcttgaacctgggaggcggaggctgcagtgagctgagactgtgccacttcactccagcctgggagacagagtgagactccatctcaaaaaaaaaaaaaaaaaaaaaaaaaaaagagtccaggagaggggaggtgtgggaaggacaggccactgccacctttaccccaagctaccaccactgcaatagctcttgcctggctgggaggaggggacaaaaagaatgtggaatcagctatgagactgaagttttgaaatgaactgagctgagtcttagaaatctaaatgagactggataattgcaagtgactgaaaagtcaacggatgactttaaggaagtccccactaatggggaaagtcagagaaggggttgacattgcccagatggggtagttatgtaaaaaacgaaggcattctatgtttgtactctgtgaactgagactgccgcataagccagcctcctttatctatcagtctgatccagaagaattattgatttattcatgcatttatcccacaatgcttagtatcatctgcgtacaatgctaggtactaggaaaacaggacttcagggttttgcaaatgtgctctcttcctacccactaggattctgaattcctacacagggattgtatcctttttttttctctgtccctcacctctgtttattgttgttactcatttaatattgtaaggtaatgtgttgttgatctacagtgggaaagtgctagcattgtttcagattcaggaagcttattcacattagtaatggtaatttcttattagaatcagtaatagtaagaagtgataagatccaagtatggaagtagcattttattttcttttttctccaattgaattatcatatattttaattaagatcatgttttatattattttgtgtcattcttcagtaggaaatgatgcatcagaccaaacaaggtgctcagttacagttagttaattgtgagttcatgtatggttttcaggtaagtcatatgccagctctggccctcatttttgtcatccctaagatattgtgtatgtttgattgtgtggttgtgtatagcagtagcaataatagtggtggtatcagtagtaatcattgtgaacagagatgattcttttaaaattaaaagctactgcaatttaatagctactgccatagtctgagcatgacatgaggaggttggctagaatatttcaatctttattgattgaggccaataaaaactgatctagaggctgggtgcggtggctcacccctgtaatcccagcattttgggaggccaaggcgggtggatcacttgaggtcaggagtttgagaccagcctggccaaaatggtgaaaccccatctctaccaaaaatacaaaaattagcagggcgtggcagtgcctgcctttaatcccagctactcgggaggctgaggcaggagaatcgcttgaacctgggaagcagagattgcagtgagctgagatcgcaccactgcactccagcctgggtgtcagaacaagattctgtgccctgcccccaaaaaactgatctagagaccccaataattacctttcagttatgtcatgagtgtgtacttaatcacctggactccactatataatctgtttggcataaactgtttttgctcttttctgtgattccccaacacatctattacaccctctgtagagtatcttaaaatggttgccgtcatcctgggtcacccctaactttggcgtccatatttgtaaagtgtcttttccttcctctttgactgcctcagtttcccccagaatacctcttgtgatgcttcttttgttctgtccactccctcagtgcttgctctattctccctgctctttagggcttttagtgtgagaatcacagaagataagtcattgacatacatacaggcttgactaacggggcagatgcagagaagtggatttttatggaaaatatatggaaagaaacctggccaaagagccatcactaggattccaggtctggcgtggccacagatctgctgtgtggtcctaaacaagtctgctacacagagtaacgtgcactaggcttagctagtattataactgttgctggttattagataatctttcctggcctcagtttccttgctgttaagtaaggaacatggcttgagtgatatcctgagtcctctccactctcattttaggtgcaatacgattataaccctgactaggataaatcactagggaacaaagatgaggccctaaatctcctgtgtcccttatgacactttgcacgctacaggggcagagtagtcatttaataattcagtactgcaactgggtttttagggcattgctgaggaattttttattatctaaatatatgcattactggcaaattaaagaataaatggacaaattctactcagcatttgtacagtgttttgaaagagactcacattcatcaatttaatgtcagcctcgcaaccattccctaaagtaggtagagcacatctgacctcaatttatggataaagaaatggaagcttagagaggggattatttttttcaggtttcccagctagtaagtggcaagtctggaaccacaatcccgggctccttatccctgtgccagtgcgttttccagcctactaaggactacgtttttgggctagttgggaacagtaagaaatacttcattgtgaagactgataatattcagatgtattaatccctagaagatacatggcccaaaggatcatcacccaggaatgttattagaatgaagcttacccatctcctgtgaggacctggctaagcagatctgtgcctggagttacagtcatggcagtgctcctgattctgaagatgggctatgggaagaggactttgggacatgctaagcctcctgagtagacacttgagccttggcatagttgggattagggaatggtaggagaccctcttaagaaagaaaagagtgttccctgactcaagagcctcatgaacctgggtcttgcccatgctgggtagctagaaatgtaaccatatctgcagttcttggaggtcaatgaaaaggttgtgtaaaggagtattgtttggcagatgtctctagtaccattgctgcaacaaataaagctggcttagcactggcctgtctgaagctgtgctctgcagtggttgtagtcatactgagctgaccacctgaccatctaggctcctaggaactgctagaagggccagacaatgaggacccaagagcttccaacccaaggtactcctagaagatcccattacttgacagcagcaacttctgcttctagaacttgctgagagacctgctgatgagagcagctgctgtcagctgtcaggaggagctgctgccccaagagagcaggaacagcctctgggagctgtgggtggcccatgcccaacaggagtcaccagtaggagcagcagatagagtaccaggtgaggcagtccttcctggttgtcctcagccccttagaattgttgagaaggggcaacatggtccatcttccaagaagaatccttccctagtagttgacctggttggagacccagcagctcagggtggaggctccagctggcttgaattgtctcctggtcttcaagtcacttgttggaggggtggcccagggaaaaaggattgccttcccaaatgatgttgatgaaaataatatctgtaatccaaaaggtttttaaaatgtaatttattgcctgggagcattggttcaagcctgtaatcccagcactttgggaggtcgaggcaggcagatcacgtgaggtcaggagttcgagaccatcctggtcaacatggtgaaaccccaactctactaaaaatacaaaaattagctgggcatgatggcagactcctgtaatcccagctacttgggaggctgaattgggagaatcgcttgaaccagggaggcagaggctgcagtgagtcaagatcgcaccactgcactccagcctgtgcgacacagtgagactctgtccaaaaacaaaaacaaacaaacaaaacaaacaaagaaaaaacccataatttgtgaatattcgtacttctatactccatcactctttactgactaactcccaagtggaagtgaatgtttccatcttgtgtcatcacactgtctgcagcactttcatatcagccatgcatgtactccttcatcagatgttggttgagtactgtagatggctcaggccatcaaatgtcagttttcctttgctgcattgtacttatgtacatatcttagccctccactagactaaagtcttttttgttaagtcctgataggttaggtttatgctgtagccacaaaaccccagaggtttaatacaacaaaaattttatttctcactcattcacaaatcctacatgatttggttgggtgaatattgaggggctgctccatatgattcctcagggactcaggatgactggggttccaccatcttatagctgagctaactggaacatgtggccttgatcactgagatggggaagagagagtactgaagggtctcacccctgcaattacattgcaattacaattacagtactgaagggtctcaccccagcctggagatagcatcacgtctactcacagcccattggccataactaatcacatggtccccacttaactacaagggaggcagaaagcgtaatccccctgtgtgcccagaagaaaagaactagatgagcatgagcactagaagtctctccacaagcttttgattatgttcttggttccctcactcacttgcagcaaagttgtctcaggaagtatcacattcttcatttgtaaaaaggggataatgtaagtgatgaaaagtcaagtatgtattgccaattttccagtttggaaaagactaatcaataatttaggcatcctctgtgtgaaggtcttggtcttttctctttcctagtaatgaggaggtagaatggtaggtgcgtaattaggggcagaagcagtccccttagaaggccccagatgtctccctccagggcaaggcttagcctcatttcctgccatagaacaactcctgcaactgcataccaccctcaccccagagcctcagggcacctggcttctcctgctctgtaggcctatatggaggcccattgaccaggtctcaattatgtaacatctggcctaattaaacgtgtactgtttacctttattcatgcaattgccattgaaagagtaggatttgggattggggtgatctgggtgatctaatattgcaagttattatgtcctaacttggagtcagtgtacaagaaacaatgatcagagttcagaagacagtgggtatttcagtatgcatattcatggggaataaatgactggagtatagagtaaaagaattatggctgggcgtggtggctgatgcctgtaatcccagcactttgggagaccgaggtgggcagatcctgaggtcaggagatcaagatcatcctggctaacaaggtgaaaccctgtctctactaaaaatacaaaaaaaaaattagccaggtgtggtggtgggcgcctgtagtcccagctacttgagaggctgaggcagaagaatggcgggaacctgggaggtggagcttgcagtgagccgagatcgtgcccctgcactcccgcctcagtgacacaactccgtctcaaaaaaaaaaagaaaaaaaaaaaagatttaaaacatggaaaatttgaatttacaactgtgcttgttatccttcctgtaattgtgttttaaacatcggttgattgagtttttttcattgtttgtttggtttttgcataaagaaatgtttgatatcacatttgtcttgtccgtgtttcttgtgacaggccccagcactagtgtggcaatcctcaactgcaggcttctgaggacagaactgtgtgctgcctgcttcactctctctccaagctccttttgcaatgcaaaataaggtgtttaataaatgatgaggctggtgaaggtggtctgcagtgacagccttcatatttaattcactacaccctcattctttcctattctttagaagtactgttgggaccttcaaatctcataaatattctactgccctcctccccctcctcctccctcctctccagaaaaattccatctgtgcaaatcccattttgttccaagggtgataatcttcagggaaacttatggaatgtgatgggtttactggagttcctgggtgacaggcccccaagaacccccttcagttctgcagagcttactgtagagatgacatcaatgtcccctggccatctggaatgaactgagtgtgaggtggagagagtgtgggctttgaagtgtctcccacctgatttgaatcccacccctgccgttgactggttgtgcgacattgggtctcagttcagatcttgttcacttgtgttctgtagtggatcctggcatctgttgctccatctgcctgccacagtttcccatccctcttcctctggttttgattccttgaggggaattcctcatccacctcacatggtcctactgtggctatcagtcatggaatcacaaagggatcttcctcactcactggagtgggcaggtgacccaaagcgctccattgcactggccccactcactgtgcgagggaggagcctcattctcaagcaaccccagttagcatttctcctgggactagtgcatggagagaaacaatcccttttgcacatgggctgcctagaaagaatgtgagtctggggcttcgggcatctgttctgtttgacatgtggcaatatcctttgagaatgaagaaaaacagacaagcagcctgagagctagggcgggggacagaggcttggccacatggcttccacccttgcatgcagtgggcctggagtcagcaccacccctgacttcccaaggacagaagccagcacttcccctttttgtttcagcaactttgggttgggtttctgtcacatgcacttaaaagagtttgaatacaaatacctttatcatcctctagtttttaaaacacattacattttataagcaatatataaattcataattacagacattcaggcatcttagtttttccttagaagaccaagtactcagaggagggctccatgcttccccacctctgcccaactggactctcccttgcaaaacatgtgtcaccactgacagctgtttggggtataaacttctagccctttttctggtatttctatctgtatgtttgtatacatgcatagatagtttgttttattttttagcatatactgtaggttattacatgtattcttctataacttttttagttttttttttttgagatctttgatgttaatacatataattctactccattctttttttttttttcttttttttttttttagtctcactctgttgcccaggctggaatgtagtggtgtgatctctactcactacaacatccgcctccgaggttcaagctattcttctgcctcagcttcccaagtagctgggattacaggcacccgccacaatgcccggctaatttttgaatttttttttagtagagacagggtttcaccatgttggccaggctggtcttgacctcctgacttcaagttatccacccatctcggcctcccaaagtgttgggattacaggcataagccaccatacccagcctaattctacttcttttttattaaagacttcacagatttgatagcatagttaatctgcttaaataatacgctgttgatggacattgagttattattgtcctgtctttttctgtagagggaaagtttgtgtttgttttcctacatacatttggagacatatctgtaggtagagtcttctaatagaatggctgagttgcagagcatgtatgtgacacattttggtagattctgccaaatggtgttccaaaaaggcttttcggattcagactcccacctgcagagcaggaaatatttgttttcccacatcctcaccaacaccgaaggtgagcctgtttcagttttcctagtcttgaaaatgaaaacacatgagattgttgttgctgttcattcctctgaacactggcagagtgggcacccttcacagaggtcttggtctcttgcatttccccttccattaattgatactcattgatttcactttctaaacatgtgattgtgtgtccttcttattgacttgacaaattcctaattcctaacaggtctcactgccatgctattgatgttgtaaatattgcttttggttttgtttataaatgggttttattttgtttttgtttttgtctcgcgggtatatgtatgtatagttttaggttttgtttttgtttttctttaatcaggccaacattttcaatttttatgactttgaacctgttcatctttttctttatggcttctgagttttgtgtctttcttgggaagacctttcccatcccagattacaaagagtttctcctatgtgtattttttattaaagttagagatttcatccagtattgtcatctttgtcttagtttcttcatctgtaaacaaggattgtaatatgtgcctcttaaggattcaatgagataatgtgtgtaaagcattcctcctccttctcccacctctgtcttattctgtttgggctgtcttattgggtagcttaaataaacatttatttttaacggctctggaggctggggcatccaagatcaaggcaccagcaaatttgatgtctggtgagggacagcttcctggttcttggagacgccttcttgctgtaccctcctatggcaagaggggtgaaggagcgccctggcggtgatcttttttataagggcactaatcccagttatgagggctctgtcctagtgacctaatcacctcctaaagccctcaactcctgataccatcacaatgcaggtgagatgccaacatatgggttttgggagaactccaatgttcagtccaccctcccacctttccagtcactgcactgacaagcttgcttcattcctagtggagtcctcagggctgtttctttgatgccaaggaggttggcacaatgtctgggaatcctgtgtccacccggccaccagcaggggactagctgcttcctgggagtgctcaggccctcacaccacctttgctctcctggaaagtgacattcttctatctactttctagtccacattttgcagtgcaaccgcgggactggaacatagccatgggccagaagtcttggcatcatcctggactctcatctttcttttctccccacatccagtccatcagcagatcctctcagctctaccttaagacacagtcagaatcacttctccacccctcctctgctaccacctgggccaggccacatggcctcccacttggatccctgcagtgcctgtcccaccctgcccctgcagcctgatctcctaaccctcatccttgcagtgtccatcccaccctgcccctgcagcctgctctcctaaccctcatccctgtggtgcccatcccaccctgcccctacagcctgctctcccacagcagctggagtgaccgttgaaaatgcacatccagtcatttccctcctctactcaaaaccctccagacccttcccacattatcagaataaaagccagaggtcccactatggcctggcaggccctccatggccttcaccttcgtttcctctcacttcatttcccgtgctctccctgacatttctctcactggctaccttgctcttcctcaggtatgaccttcgctccctgctgcctggaaccctctccttctggattctacaggactggcttccttatttcctgcaggcacctgctcagttgccgccacatggagaggccttccctggccctatctcaagcaccccgtaatcccttttcactctctgtccccctttccttcctcagtcttcctcagcactaagcattgcctgacacattatacatttacttgtcctctactggaatgtcatttccatgaggagagagactttttcttgttccctgctgagtcaatctccatccctagagcaatgcctgccatatggcagcccctcacctgtttgttaaatgaatatgaaaatgtcgaacctggactctttctaatgagggcccagcctgcttttagaaccttggctaccttccctccagtgggcctcggagtgggcagtgtgaacatttgctcttgtgaatgccgtttcccatgggccttggtaagttctgccatggagggacgggactggtgagtgtgcgcatgtctgtccatgtttgggtctgtccaggcatcgtcctcccagcagtaaatcatcactgcactgaccgtgccttttcacatgaccacagggcaaatcagcacgctcttctgcagcctccctaattggtgtcatcttcaaaaacaacctgtggcttccgactgtggttctgcttgtgaaagtgtctccctatttctcatggaacatcttaatgtagctgggtacttggatctctctgcaccttctcatttcaccaagctataaaatgaaggcctataaataggtgtgataagcagatcaaggccatttattgcagaaccttcctcctcacctcacctacagcccggagcatgtgcatgcagagcaggcagtctctggggggatgcatccaagactttgggtattagaacaaggcatactggggtgtcaggggcagagatttatctcctctcccagttggagaggggagggctccctccttaggcacctgctccttctccttgtctctgcccctgccttttctctgcctttgattaattttttggaggggatgatgtagtttagagcaattaagttaattgtcttagaaatcatgatttcttttgatgcactgtttcctctatggaaacttcctgactcttggttgctgtcagtgtttaattatggttgtcaggcaagatgatttgaaatgattaatgggaagatgtatttcaagaacaacagcaggcatttttaaattaatttttaaatagactttattttttagagaagttttaagttcacaacaaaattgagaggaaggtacagagatttcccatccaccccctccctcacacatgcacaacctcccccattatcagcatcccccagcagagtggtacagttattacagttgatgaacctgcatgaagcattgtgatcactcagagtccgtagtttacagtggggagcatccttggtgttgtgtattctgtgggttcgaacaaatgtgtaatgacatgtatctaccattataatatcctacagagtagtttcactgccctagtgaaaattaaaatttaattacacaaataatagatgaatgcatgctcctttaaaatattaaaacattacacataaagctaaagtctcttttttccaccactctcaaactcagatcttgccccagaattagtcactgttatcagcttgtttgtatgcttctatttgtgccccaggtaaccttggaggatagagtgatgatactaattacatctctgataccattgacaaaggagctctagggctaggacatatactggggacttcatatgattctcccagtgggctgagcatggtggcttaaacctgtaatcccagcactttgagaggctgaggcaggcagatcacttggggtcaggagtttgagattagcctggccaaaaaggcaaaactctgtctctactaaaaatatataaattagccgggcgttgtggcatgcacctgtaatcccagctacttgggaggctgaggcaggagaattgcttgaacccaggaggcagaggttgcagtgagccgagatcacctcactgcactccagcctgggcgccagagcgagactccatctaaaaaaaaaaaaaaaaaaatcatcccagcaaccctataaggtaggaggtgggtactgttttgttaataacagctttgatgagatgtaagtcacatatcatgaaattcaccatttaaaaatatacaagtaaacggttatatattcacagagctgtaattcatcaccactaattccagaatatttttatacccccaaaagaaactgcgtacccattagcagtcactccccatcccttccctttccccttccctcatcctctggcaaccactaaactatttcctgtctgtgtggatttgcctcatctggacatttcatataaatgggataatgtaggagtggaattgctgggtcatatggtaacttcagatgtaacattttgaggagcatccaaactgttttccaacgtggctacaccattttacaccaatgccactaacaatgaatgaggattccaatttttccacattcttgcagcacttattatcatctttttgatttcagccattctagtggatatgaaggggaaactcattgtggttttgatttgcatttccttagtgactaacaatgttgaacatcttctcatgtgcttaatggccatttgcatgtcttctctggagacacatctattcaaatcctttgcctatttttaattgggttatgggtctttattgttgaggttttttaaccctgttgtacagatgagcacggcccttcctctgtggcagtgcacagggaaggcagaattattgtgattttcagttcatatgaaattccttaagtgttgggcttgagttttacttcaattataggcttatcttttcttccatgtctaaataataatagtattcatttgttagtagatgacagacactgtattctaaacactctactattctaaacaactctgcagaaactgaggctcagaaaggttacattactagccaaaagttaccgggtaagagaccaagccagggtccaagtcaggtctattgacttcagggcttgtattctgaagtcaatacttagccatcaaaagagacaaacaaatcccgtctgccagtgtgtgtgcagaacccgtttgtctctgtggcagtggtaaaacaaatgaccaaacaaaacaaaactgatgctgtgatgctggaccttcaagctagtgatgcttcagaatacaccacaccagactacctgtaaaacatctgctccaacaggttgcaggctgctcaggttgaaattgctccaagctgggagctgcagaactgaagtagcctttcagcaaaattgtgacttctttgttgagagaggaagtctgaagatgtttcctggggcctcacctcttacctgctatttcctgagagtgcttcgtcaagattttctcagttctgtttctggagacagagcaggaaccattgacttgaatcacgttagcactgtgagtggggagaagcattgactccctggcttctccccacaaagagtcaccttgacaggcccagtaatatccctgcagccatgggcgtgctgggccatatcgttgccctggtggaggtctggcacaagactcagggaggggacattctttctctgaagccaaagcagatgttttcacttcatctggggatgaatcatctggggaatgagaacagtaggcaaggaaggcaggatcaccattatcacaggagatgctttatccggcacctactgtaagtgtaccaggtttcttgaggcagtgcctggaaaccttgatcctggtctgcctgcatccccctcaggaacttgactgcttgggctctgactgcatgcctaccatgtgtcaggtcttcgaggaggagtcccagtcctcaaggagtttaaagttttgggtagagaaacgtgtggattgccaagttactgcaaagtggactgtgataaacactgtcactgagctctattaagcaagtgacaccactccatgaacttggatgatcatagctctttcccatctacacagcaggttaatcattctcaccctgtgtaattcacaagaatgactcgggagtaaatgagaccaagaatgtgccagagttgagtgtactagtggtgctaacattttggaatcagagatccctttcaaaggctgatgaaagctttggactttcacctcagaaaaattactctggagcgtgcgcttatatgactttgcaaacagtttcaatttcatggtttttatgaacatcctgaaacccatccatggacccttgtgggggacctgtaggtcaataacgcctgtttcggtgcttgttccctgaaggatgttttaaaagtcccagataaattcacattactattattaggaatcctatgtttctcagttacttctatgttaaaaatctttctcctaaacaattatttgctaaatatcccttataactaggtattatttagattgatgaactttaaggataaagcaaaagcaagacaatctgattggccagatttgtcttctgttttgtgtacatgtataacataaaatggaaaacaattgcagaggtgcaggctttaaaaaaatacagaaacagagcacatcaacctggattttaggtgtgacatcttgcttggttgtgtatttcaggggctgcagagctcacaaagctattgcggggaggcagcgttaaatctgttgctcttgtaaaaccaattgtatggcatatagctggggtggcgtgtgtataggaagctgagagcattggtcacgccagttctctgagacgggaggcaggattgacagccacagcttggcctctgtgctgggggtggaatctgctgcgtgtgcagcctccttcctgcccccctcccccgaccccatcctggcaggcagtggtgctgagcagatggaccccatccccatcttgggggcagatgtgctgctgactgccccatctgcccactcctgctttacctctccctctctctgggcacctgcctccttgctcccctgacgcagcccctctgccggcctctccctctcagtggaatgttctgtcccaggaggcattgcatcactgctgaccagcctcctgctcctgatgactggtttggctctgaccacgaaagggctcaggtttgggtttcagggctgctgtgggtgtctctgtcctaggtggcctgtctcagagttggagatggtaaggtcatgataccacccagcatctctacagcatcatattttctccgtactagagcactttctaaggtctcccctatcctctcatggcatgggttactgttccaagcatcagcaatgagtgaggccctctattcacttgcctgtcactctcagggtagcagatggaggcagtattactctgcacccaatgagagtttcactggtgcatagcttggtgattaaccccagttcctctacccactggatatgggatcatgatcaagtgatggccctctaagctactcagtgtctttgtctgtgaggtgggactaacacccgcttctttggtttttgaggattaaatgacattgtagaaaaactacaaagtttggggtcctcaaaaccacttccacttctgatgccagttgcaggttcaagggtctccaagaccacattcaggtgttagaaagtcctacagcacttactgaaagtggttataatcaaagttatggtttattgcaggaaaaagatacaaattaaaataagctgagggcaggggcccacagggaatctcacctgagcctgtatttttgttttgttttatttttgagatggagttttgctcttatcgcccaggctggagtgcaatggtgcaaccttggctcactgcaacctccggctcatgggttcaagcaattctcctgcctcagcctccggagtagctggtatcacaggtgcccaccacactgcccggctgattttttgtgtttttagcagagacagggtttcgtcatgttggccaggctggtctcaaactcctgacctcaagtgatctgccttggcctcccaaagtgttaggattacaggcgtgagtcactgcacccagcctttttttttttttttttttttttttttttactattaagaaattcccccttttatctttagttgacacataatgtatgtgtttctgggatacagcatggtatttcaatatgtgtacataattcattttttcagtttttgggtttctgattcacgcacggtttattctggtgtttggtgtcaggtgtgggctgcaattgtatctttttccaaatgactctccagttgtcacaatactatttattaaaaagtccgtctcaaaaaataaaaataaaaaaaaaataaataaaaagtccatcctgttctcacagatgtgagacactatctcaattatattttaaattttgtatgtagttgggttgacttttaaactttctattctgttttagttgtctggttgtttactcatatgcaatgttttgatataaagaagaccaaatcacttccctcttggctcttatttataagaggcttatcagttaattttgtatatttttctttttttaattttactttaggttctgggatacatgtgctgaacgtgcaggtttgttacataggtatacatgtgctatggtggtttgctgcactcattagcccatcatctaggttttaagccctgcatgccttaggtatttgtcctaatgctttccctccccttgtcccccatccctcaacaggccccagtgtgtggtgttcccctccctgtgttcatgtgttctcattgtttaactcccacttatgagtgagaacatgtggtgtttggttttctgttcctgtgttagtttgctgaggatgatggtttccagcttcatccatgtctctgcaaaggacatgaactcattcttttttatggctgcatagtatttcacggtatatatgtgcaacattttattgatccagtctatcattgatgggcatttgggttggttccaagtctttgctattgtaaatagtgctgtaataaacatacgtgtgcatgtgtctttatagtaaaatgatttataatcctttaggtatatacccagtaatggaattgctgggtcaaatgctatttcttgagcctagtttttactggggctcactcatgtagctgacagctgtgtggctggcctaggtctccagcctctctggagattgagttgatgctgcatggcccagggcccctgccataaatcacgttattagactatctgggtagcccaaggtccccactcttctcaggcagtacaatctaagggtttagaggttacctctcagagtccaggaaagggaaaaagccacactttttttttggataaggttgattctttactagacaggtagactttggtagactttggtaaattgctgttagtgctcatttttatgcctcagggtcaaggtgagggggagtgacttcaattttctctctttctcctttctctgtaattatgtctgtggtcttgggagggtgtcattcattgtgcctacttgaagttattatcagggtgtgtttttgcccaatcataatgcttctcttttgtgtggtgctctcaacctgtcaggctcacgtgtgcttgtattaagcctcacaacaacccaaggaggtgggtgggcaggtgtcattattccaattttacaggtgaggcaggtgatgtcataggaagcttgctgagtcgccaggtctcaggactgacagcaggctgtccctgggtatctttccacctcctctgctgacccgctgagcgatgctgctctgtttatgcacacagccttgaactagttgggcctgggttcagatctggtccctgtcacacccaggctgtgtgatcttgggcagaatttcttcactgctcccctgcccatagggttgttgtcagaatcatgtgaactgaagcatgtaaagtataggcttttaatactgttcgccgagacagaatattggttactgttgctgcaaccatgacagcaataatttcttcaagcgttctgctaggtgtataagaaattcagaatgagaaagtatcttgaatacagagaaggcaatttatggcacaagatttaagaacatgccacttaaacgctcccaattttaacctcaataatccttttcacgtaactaccaggtaattatttaaatagtcaataaaataatatgtgttgttcccaaagctctctcctgcgaggggttgtctcttccttcaggtcctggtgcctgggcttctcttttctgcccttcctgcctctccttctcacctagtaaaccttgcacttttttcaaatcccaacaactttccaactccaggtgaggttcacaccctcttatttaccctttcctttgatgcattgatcaacccacagtttcacaattatttgacagtttgattaatatctatctcttcttctaggctatgagccgcaggagggcagaagctgagatcgtatctcccagatttggcagctgctgccacttgcagctcaaacctaaaagtcaggtgtgatcagttagaggctccaggggtgattcccagccgtccgtcatcactgtagagaacactggcccttgtaccctggctgtagcgcagacaggcctgaggggaaccgcatccacctccgccctagatgcgatgttggaatgcttgagaggccctctcctgaccccctctgtcaggaacattaatgtcatttcttcccccttttatttatttattttttgagacggagtctcactcttgttgttgcccaggctggagtgcaacctcggctcactgcgacctacgcctcccaggttcaagtgattcgcctgcctcagcctcctgagtagctgggattacaggcatgcgccaccatgcccggctaatttttttgtatttttaatagagatggggtttctccatgttggttaggctggtctcaaactcccaacctcaggtgatccacccgccttgacctcccacagtgctgggattacaggtgtgagccaccgtgcttggcccttctcttttttaagactagtcccaagcaccaggtgctcatctgccttgttagctctgcatgcttcctgggagaagcagacccctggataaatgacagcagctaattggttgcttagaacacattcaagatggtttcctcggacttctgttctcctgactgtgcattaacatagcaatgccaaggcaaagtttctatggcaaaggtttaagaacatgcaaattgaatgcgcctgattttaacctcattaatcctggcttggagatcccccgacctcctttcttgggtgtccagctccagaatgcccctccccctttcacaggtcctccagcagaaatgaacacggcttcagtcccgaggactcctctagcctagaagaaggaggcagcattgtgcagactttggagtcagacagggtggggttctcgtcctggctgtgctattgacattgtggccttgaacaagctttaagttgctaggaacttcatctgtaaaatgggcagaatgcccagcccatggtcagccctcagaccatgccagcatgtcctcctctccaaagttcattgcggtgggattgagtgctccctttccaatctctcttggagtcctgaatgaggacaagaagctctgagacctcatgcccagcccctccttcctttgtgtttcccaattaaataactgcaagagcaaagtcatgtgggagaggccggcaggcagggaatcaggaagaaggaggagggaggcatccttcctggtttctttctacctccccaccctcctacttgaagtgtcaagccgccccccatcctgcttagagcgtgcacacagcaccaatcgcttcgtactggccccattagaaaccagtgggctagagctctttaaccattgtgtaacttatatgctttgtctagaactccttctgataagtatttccagtggttcattcactggccatagtgagtttgaggtatgaaactgttttgttttattttttctcggtatgaaaggcagtcttttctctaggtactctgcatgaggccacttctcgatatttgggggctggttgttatccacgttgggaaatcaccagattcctccctcctttcttatttcctctcacctcctccatgtctgcccacaaattcaaacaaaaaacaaggaagcgaagaagctgctaatttccctgctttattcctttccttgagagaatgaaacaaggaagatggcaattcatttggttccttggtaaacaataaaagaatggactcaatgaagagagaagctaaaattgtgttttggatttccacaagttcagtaatgttctatccataggttcttacacctgtaccctgggtcacaaattccctttgccatatcccatttctttctgaaaaactcaggaatccaccccttttagctgaactcataaatctgccttagttacaattctgtcattttctacgtgtgctgccatctttaaaaaataatttttcagaagccttttatactgtaatttgtagaaattatcatttctccctcttgttatctaggctaattcaccttagaattttctgagagtgtgctaatgaaaatagacattcttatgttagaatggctcctaaaggcaaaagctgcatttttttgtccacttcagagtttaggcttcttcaggcattttccttagttgtatgctgagagtgttctcttcagcttaatttgcaaaatgtccttttttgtgttaagtttactgttgtagtaagattcgaggtataaagctggtcttttaaaatccttacccttgcatttggcattagatgcctctgaatctcacattcatggaccttcaggtccatcttctccatgtgcaccttcagcacctctagagctctttcttgtctcctcaatcttctcacctatgtttttctaaaaggactgtgcatctcaaacaatgccactttttatcttaataaccatacttctgatagtgacatttttccctcccctgctttttgccttttctcgagagtatttcttatacatagcatccttcaatattcccatgttgcagttctcgttggtttatctgtttcatggtcatctccacttttttctattcccctgtcccctcgcccctgctatttctatggagaggttggtattgattttctttctctgacgcgctgtcagtcatggttatttctcagttcctccatgctctttcctatgagaattattttttatgaaaatgggcatcccttctccagcttcctctcagattccttttaaggatttaggggaaatgtttcctttctccttcagatgatttcaattgcccaccaatcctgacttctgacaaaggcaaaaccaggtttccaagggcaaattcaattcactgctctgtctccagcagttagggttcattcttaggttctgaaatcattccctaaatttcttttatttctcaaactccggttttgcctttctggggtccaggggccttctgggttaagtgtgagtcaccgccacataaattctgcccttgccgttcacacgcaccccatcgttgggttccagagcaaaaactcttcagggagcctggctctttctcctgccctgagaagactgaaatcatgtcaagggtgagaacttggtctcctgagtctagaagttttgaagacctcactggaaatcattgactgtgttgacctctggaaccatcagcatccctcctggttccccataacagaccccaggaaaccctaggaaaccttcccaggctgcagaacctggaaacaagaatgaccaatctcagtgaccaatatcatcagggctactcaccaggctcggaaaatctccttttgttcttctattttccatatggaatcaattcttataagtaccaggatccctgctggacatcctaattctgtcaagattcttccttccctttctgtctctgtctcagcaccgtcaccaccgtattgcagaagggaagcttgtaaggctctgaaaggatccgtacagccagcgacaaacaatgccctttcagaaaatggagtttctttactacttacttgaagttgttcttgggatctctttctgcccttcttgctccagagctggttcatggtgtctcaattcagttcatccccgtccccaaccctgatatttcttctagtgcagaatcagtgaccccttccctgccctcacccctggcgggggatgtgtaatgttgagaaggaggatgaggtgaaaccacacggtatagagccgggtgtatggctgggaggattgacgatgtggcttccaaatacctacccaaacgggtgtcttttggaggacgacactgcctctggataaatgatctctgggtacacagaggaggcatgcagtgatttgtggttactatgaatagaattgcccatgcagggctagctccttggggttctgtaccctgattgaggtcatggttaatcaggggtgcattctctttcataatccctggggatcttgcctggcatttttgtttagctggagaaatattggcttcgctctggccacaaatttcccacactggcgtggctcggcgctttctggctgccttggagatcctgatgcctgtgactttgcagaatgcccaggaactgctcgctcagctactttcactctcgctctaaagataatcgcctctaaagcaaggtaatggacatgttttatccccagcaattcggtttgcccttctggggtgcttctcaaaagaacagcctcagagatgctgacacgtgacttcagctaaccagcttgtgtgggtgtgatgtttaatcatgcctgtctttttcttatcttttcattatacctgcgaatgtctgttagccacatccattagatgcatttcttctcttttttttgtaaaaatcaaatcaacccctcccttccattggatgaggagataattatcatcattcactgaaggtcgacattctgtcttgaattatttgtctttgggcaagagcttgaaagaagcattgtaattccaacatatcttcttgattaaatctggtttttagaatgtcatagagtgtgataagagggtctcatttgtgtcccaggagaaactgattcgtgcttccttggatgagatgttgagcaaaaggatggtgagattgtaggagcagaaagagggatggagaagagactagaacatggaaaatcaggtccacaaatactgctatgtcagtagagaaatggcccctcaagattggctctgggcactcatacacatttgtaacttttaagtcatttactttcagatacagttttgagtattctttgaactacaggtgtcactggaaatgattccctctgctcaatatggatttgcatctatgttgatttcatgttgttacctaccttattaaatcctgtgggtgaactcattttattctataagccaagatgctgtctttttttttctatcatggaaccaatataaaaattccctcttttttttttttttttttgagagtgtccttagtatacccagaccccccaacccattgaggtcagtaattttaatcttaagaggagatattttctcatttgtaaaatagggctcctgactcagtttcttgggtctcttcccagagatattctttatttatatacagtgctccccactcatgccccctgaatctgcaactttactttccacagttttagcgacttttggtcaactacaatctgaaaacgttaaatgggaaatgccagaaataaacaattcctaaattttaatttgtgagctgttctgagtggcgtgatgaaatctcctactgtcccactctgttcttcccatgacgttaatcatccttcttccagtgtatccacagtgtatacaccacccatcctagcatcacttaggagccatctcagtgagcaggtccactgtcgaggtatcgcagggcttgtgttcaagtaaccattattttccttgataacaatcccaaagcataagagtagtgatgctggtgattcagatatgcccaagagaagccataaagtgcttcctttaagtgaaaaggtaaatgtttattccaggtatatataggaaaaaataaatagtatatatagaatttggtactatccaaggtttctggcaaccagtaggggtcttggaacatatccccccattgcagataagggagaactaccataaacatgtatctgcatgtattttttttatgtggaaaggaacatatcatgcatactgtctagccaccatacttaacttcgttttgacaatgtgtctctgaagagattgtagcctgtctgcacacaagcctgtaccttgcgcttttgtcctgattgaatagtgttccattgtataaattattataatgtgttttccgagcctcctgttaatctagattgtctctgataggttactattactgacagtgctgcagtgaggatccttgcacacccatcttggcatgtatgtatgagtccatcggaaggatacatttctgtaaataggattgctgggtgaaaggtatatttgcttttgttttgatgaaaacagtcatctagcgcatgagcatgtctgtttgccccatctcaaggttttatgccttctagttaagcatcggctactacatgtagagctcaggacactgacccatgcacgaaaggtacataagtcaaagttactaattaacatgtatcttagtaggagtttggggtatttgttcaggattgctgatctcatggctagattagtgaacattcaccccaagagtgaaaggctctggaatttaaccacaagcttaggctttgaagatatggtatctcccacccatctccctctgatggcagattaactaggcggtgggcagaaccaacccttccacacgccagcctgtcttccttagagagcacaagtgcatttgcccagaacattcacactttcagacctggagatgaaacacaattttttggcagcaaatctcaaataacatgtatttaggattacaaagtcacagttttgcaaccagagggcttgggaaggagttgcttaaagcaagaaaattgcaatgcagtttttacaaaaattaaagatataaagtccatcttcccaaattacattccacacatttacttctctacaaatgccatttgcacacaatatacccagtttgcactgaattccattccttgcttctttttcccttcttagtcacacactatctgtgcgtgtcaagacactgttgtataaaactgctgtatagaactaggtattttattttgttttgtctttgctttaaattttatacactttttggattaggtcattgaatacttatcctgttttcatctgaattttcttgggagagaaaatttaaatatttaccttcatcttaaaaaaaaagaaagaaagaaaccaatccagatgacagaaactgagagggacatggtggttgcaggtgtccgtgtgtgctgggaatgcagaaacatgcctggagcagtggaggctgtgctctggctctgccaaacaccctgtgggcctattgagatccaccaccacctaatggaggaattgccttctttcctttttttcagtaagctcttcattgaatgctatggtttgaatgtttgtatccctccaaaatgcatattttgaaacctgatccccaagatggtggtattaagaggtggagcctttgggaagcaattaagtcatgaaggcatgagtgggattagtgctcttataaaaaagacccggcctggcgcagtggctcacagctgtaatcccagcactttggaaggccgaggtgagcagatctcctgaggtcaggagttcgataccagcctggccaacgtggtgaaaccccatctctactaaaaatacaaaaaaattagccgggcatggtgttgcgcgcctgtaatcccagctactcgggaggctgagacaggagaatcacttgtacctgggaggcagaggttgcagtgagctgagatagtgccattgcactccagcctgggcaagaagagtgaaactctgcctcaaaaaaaaaaaaaaaaaaaacaccccacacacacactcaaaaacaacagagcttgttcaccccttctaccatgtgagtggaggcagcaagaaggcaccatctatgaggaagtggtcctcaccaggcaccaaatctgctggtgccttgattgtggacttcccagcctccagaactttgagcaataaatttctattgtttttaagttacctggtctaaggtttagcaatctgaaatgactaaggtcctaaagtataatgtatagaaataatgtgtgaacagcttgataaatttttacacagtgaacatatccctaaaaacctgcatccagatcaagaaacagaacactaccagcaccccaggaacaagtggctaccttttgagtcactcttcagcctctgacgatctttaacaatgttgacctctctgaagatagattagtttgcctttttttttttgagtttaacgtaattggaatgatatggtgtatactcttttgtgcctaagtttcttttactcagttttatgttcgtaacattcatccatgttgtagcaaataattatacctggttagtgttcgcggctgtgtagtattccattacaggaatacaccactatttattcattctactcttgatggatataggttgtttctagtttctggctattacaaagaatgttgctgtgaacattttttacgtgtcttttggagaacatatgtacacatttctgccaggtatacacctggggtggaattgctgggttgttaaatttccttactggggcctataagaccaggtcttgcctgctgctagattcttgtcatcattaatcatcatctatatgccaggcactatgtgaggcattgggaatagtaaggagcagaagcagatgtggtttctgcttttgtgccagcattaattaagcaaacaccaaggtaaggtggtgtgattgccatggaggtaagtgctgaagaggaaagaggcaggatcccaggacagcttactgttaggttttttaaagggaaggtgagggttaaagaaaaacagagagagagttggcggccctacagcaaaacataggctttatgtccaacataaaacctgcagaggttgggggccagcttaatgccagtgcccactgctgcttacaggctggggcaattataggcctgagcaggaggggtctggggggagcatggcctgctgcctgggaaaatgttgataacatgttcccacgatgaggtggtttggcccttgttctggtggaatgtgatgttccttgccctttctcccagcaaagtcaggcagttggtcaggctgtttctcacggcccgaaccccccgtggaatgtttcactttgaccaaggtctgtgaaatgacagggagcttacgaaacggtgcaacttggactaacacttatgacataggaagtggatctgggctgggggagagggtggcatggaaggggggctttcctgaaacagtgacacagctgagattggagggatgaggagagtataccagggtacggtgagggagaagcttcccaggaagctggaagagcacgcggggcatgttcctggagctgaaggagtgccaaggtgccagagcatggaggcgggaatggggatagaggaggtggcgaggctgacattggggttggggctgcagcctttgtgcctgtgatgggagcccagacctatagctgtgaggtgtgttggtctgagaactctccagatctcgccttccttgcagattcgtatcacagcagagcaggaagggcccattcagctacaagaattagtaggaagcatttgaaatggtccacagctgctcacaatccttaagggagtttatctgtaactgagagagtatggggaggtgtctggacagtcaggaagtacctgtcgcaggtggcattttctggctgggcacaggatcagatggatgtctttctgtctgttgacaggtcctcctgaggaccaaggcctgcatagtctgatttatgctatatgtatgtaactactttagtacagttgagggctcttgaagtcatgctgtgtttttaggaagatatttgagcaggagatcatgaaaattttgcaagaatctgcaatctggaagagtgttgattcaatatacattcattaggtgcccactctgggttactgtgtctcgcactgtcctggacactagggattcagcagtgaacaaaaacagacaaaattccccaacctcttaatgtttatattcatccaaaattttctttcaaaatggattgttttgatgagctgccggatctcttgacccctcagagaattttacattagggaaaagtgcttgtgtgtaggcataagaaagaaagaaaatctaggattggaaagttggaaaccagttttctacagccttccagaaagaactcaactcgaggactgacgtggtggtggaaggcagagtggcaggggaaagagcaccagcatcaatgtgaacattctagctgggacgcttccttgtggtacgacttggggcaactttgatcttctaaatgggtattaatagttcccacctgcaggactgaactgtggaaatgcactgagatccagcagttcaaatccctggcctgagtattgggtgattgttgcggtcatgaaggcatgaggcttctgtgcgacctgggtgactaacacagcccacaagcagtgaggaagccactcccagcggccctgcccgtctgggtcctcctgccctcactgggtgttcccagccccactatactgtctccctctccctccttctccaagtgcccagacctgctccagctgcccctgatactcagcaatgcagacttgtctggaaacacggacaacaaggcagcttggcatttccgagccaactgctgagatgaaacaggttcattgtcaaggccagggccagggcaggaagtctagttggaggccccagggtagctcgccccagagttctgaaagagcactgtttagaattttgtaaccatctgttggcttgggtatgtgtttgatggctgtggctgtgggttgaggtggagtaatgttgaccttggaaggttaggatgcttttgtttctgatgagaccatctagtgtaggtcaaaaggactgtgtcggagatagaaaacaacattttttttaagttgggtgtttttgaatcagccaaaccttaatgcattgggcagaagtggcccctggggtagtaccagcttggtctgagtgtttcatgggcaagggtgggggctgggaagagaagcttgcccaaggccctgctgcagagggaggggcaggagagctagtgggagccaggtgtgtggagctgcctttcacagaactgggttatggacccaccagagagatggagccccttctctccttcccttcccccatgtctccctctcccaccagggcttggtaggggtggggaaagcaagtttatggccaccttgatgttcactggagtggcccgaggactcctttttgagttaaagtgacttgttttcttcttacctttattcatccccttactcagtaggatggcagcagatataacatcattatgtgtgtgaaaacatacaaagacactcgttctagggggtgttgtccagcagatgcatggacgtccatgttaactcttgtgagtacagaagaggatgcagaagttagctggatccagatgctggatctccaacatccttggagatgtgtggtgttggatgcttctgtccagggtaacatggctctcattacctgggcttcagagccttctctaccttaccatctgcatttgttttttctttttgattgggtggcattcacctgggctttccttcacttcctgacgattcaagatggcaattctcatctctggtcaggctgagcttctctcagcagctcctgacatttcctccagcttgtctcaccttctcagttgtctcccattcccaccagcacatcctttgaccttatcttccatacccttctgcacctaggacctcttccactccttcccagtcaagaagcacctatgaataagcacaggtattcaatatttgttagggtggatacaggtaaaataagaaatcatctgtagaggtgacgtagaaagcacagataatagagaaataacaggtatctgcctctgtcatctttcctgagctccagatgtcagtatttaggggactgcagctgtttccacattatatcttctggcaccaacaacttcatgtgtccgaagttgaactcatgcaaactcagcctttgttttccacatgactcctccatcaactcagaaagtgaaagagacccacaggtcatcctcaactccttcctttccctcacctctaccccatgtccactcaccaagttctgccagctttcagtcctaaattttccccgaatctctatcttctctccaagactgccccaccaagccttctgccatttgtcaactcacaactctgtggcagcctgaaattgttttcaattcccagtagctatgtacctgagggctgccccctgccccccatcacctggctttgtcctactctttcaccaagcctgagctcagacctcacctcctctaggaacccctccaggaccagagtacatgacccccctccctccccaggagagccctgcagtacctcttccaggatcctgctcctctagaatgcccacttcccacccagtgtgaggatgatcagtttacgtgcctgcctccccatggacgtacactcctctagggcagaacccaaaagctgctgaaattatctttgcccagtttgacagagggagggaaatgtagtggactgaaagttgagacaccaggttcagcctgaccccagtgagtgctccacccttttttgtagattaaatgaacccagaagttagttcatgatgtagttcctgtaaaaaataataaataaacctaggaggagcctcaaagtcccttcctgacctgatgttctgcgattctgccagaggaatctgctctctccagcctgacttttctatctacacctcctcatcagaggagccttctgcactactgccctctcccaagtcaggggctggggacaaggaagactttcacttttcagtagcttcctgagccatttctttcttagctcccaggctggaggccttttcccaggtctctaatggacaaactttccacacatgacttaagagaagaagacacaggacttggacttggacagttttgctgcatgaaccactgaagtctctggaaccttagcaacatggacccctggaccttggtcttgagtgtggggcctgtgacagtcccctggcagtgtgctcatcctggcctttttctggagctactaaaggaaagaaacccagttgaacccaggatttttttctttacccccgaacttctttgtacagaagtttcactttctcataacatgatttctttcttttacaaaagacaaaataaaacagaacccaaacttgacacacaaatccaaccactactgctactgttcaggcagctggtctatattttagtagctcacctgtttcaaaagcacctaggtagtagctgggaggctcggttagtatttcaaacccccaaaagctgcacaaagcagaggctcgggttcttgagtagagggctgatgctagaaacataaagagattcatctgcatcttcttcaacagtgtgcctcacctccaactctcactgtgaaagatctgctttctgctgagcatggacctgggagagatgtgttccccggaaggcggcccgggctgtcatcaagtcagttgcacagggacagtgtgaagccttctcactgtggcacgagccatcactctcagagcacctcaagcctggcagggttccgaaaacctcagggtttaatcactcccctgtttaaggaactcagacacaatgtattttacaaattatttttgaaaggtttatatgaagtgttaaattttatgaactgtatattttaccaacaatggaaaaaaaaggcttatgagcttagaggctttcacattcattatttcacttaattctctaaacctccaatggggtaaatcaatttctgttttgcagaccattagaccaaggcacagagagattaagtggcttgccaaaaggggtaagagttttcatgggctaactggggttatttttttcacagttcatcaaatgacaagtttaacgtgatatatcttattttatgttgcatgtgataaatagttacactttttatttgttaattactaggttttaatggtcaactttagtccaaagcttctccctcttctcaccttctcccagccttctgattcagtttatacatacacacacacacacacacaacatacacagaggcacacacatgcatgcatgcatgcaatacccacattgttcttttatattattattattttttgaggtggcatcttgctctgttgcccaggctggagtgcagtggcacaaactcagctcactgcaacctctgcctcccagttcaagcgattctcatgcctcagtctcctgagtagctgggaccacagatgcgcaccatcacacccggctaatttttgtatttttagtagagatggggtttcaccatgttagccaggctggtcttgaactgctgacctcaggtgatccgactacctcagcttcccagagtgctgggattacaggtgtgagccacggtgcccagctgtccttttatttttatttggtgttccttgttggaagagatcagcttctcttcactagagaaatttttcagtgatcctggtgggggctccagtccccttttctttaggaagaaatagagtagaatgattgggagtacagtgacagggtggtgtcacatttcctgagtttgagcctcagctcttccacttgctggctgtgtggcactgggcaaactccttcacctctcagtgcctcagatacctctctatacagaggaaatgcaagcggaagtataaggaagatcacacgaaatagcgcctgtcaatcactgtcaagcacagtgcctggcacacagtaggtttgcaggatgcctgtggtttctgtcaccctgatgtgactctcctggggcccttgaaggtagcattccaggccctcagaatctccaggggagtgactgggagctgtagtttcaccagcaccgggctgatgcttgtggctgggaaacgccactaccaaggtgatgaaaggtgaaggtgggttgatatataaaataaaagaacttggaggaaagttaatacctttgaacattggttcccaaagtgtggtcctgcaccagcagcaatatccacctagcaacttgatggaaacgcagattctcaaaccttcctccagacttactgaacggaaactctgggggtggatgctagtgatattgtgtttgaacaagccctccaggtgtgtctgaggcctgctgaagtttgcaaaccatactttagaatgtgaaagagccagtccctatttcatttcaaatgagtttagatgtatatttagctactgaaataagaaatctaaagatatgtacacttgtaccaagaagacaaggaaagaaatctgctgatatgaagactcagttatatttcgaacaaaggcaatgaatccatcttggtcctttgcttggctcatggtgaaacatagcggccaccatgtgggtcaagaggcttgtgttcaggacagctgaagggatggccttgaccttactgtcctcccagcaccaaaaggagccaagagcgagaggttacttctgcctctccggaactccagcacttcctccctgggggtgctggcatctttcttatgcactgtcactctcctcgtggttactgttgtttgggtcaatgttgtaagcagttgcttgaatacaaaccctctgctttttcatccctgtttctcctgggcaaacccaaatgtgactgcaaaacatctccaaatagagtccagttcttctaagtgtcaaggcttggcccagccactgcctctgctgtaaagactttctagcctgaataccaccatggcaagtcataagccttgttcttcccctcctgtgctccacatcccagggatttgatccctgcaggctgcatttccaggcgcctgctgggtttgaacagtgcaagcctctggggtgagactgcagggtggtcggagagggatgccagggtggttctccccctcctctgtggctggctgtctgacagtggctggggatcttccagggctctattgctactcctgtccccactagcttttgtgtaccttcttgtctgtttgataaattctctggattaaattctccaagggatttggagtggtttctcttttctttattgggtcctgactaacttagccccttgtcttgcttccactgggagtggtcactcagcatttgcatacgtatcttctccaatagccatgagcttctcaggagtagccgtcatatccaattcaatgtcacatccttagtgcctactccaggagctgtcactttcaacatgcttggtgtttgatgaatgaatgcgtgataacatgtgaggagggctgaaaatgcaaaggaaaatcaaagtatgccgtatattcaaaatgcatgcaacaagcaaggtttaccatatggaaatagcgatgtatgccctgcctagtaatctagtttaaaatagtaataataaaccttaagcttgtccacagtacagattttttaaacaataatttgagaatgttcaaatctgttccattataagccaccccagaacttaatgatttagaaccctttattatttctcatgattctgtgggttatgacttgagttgccttcagctgttcttgcctgggctcgctcatcaccacgtttggtagcgattcggctggaattcatatgcgtgggacctcaggagaaatggagattctctctccactagaatctcatgctgaaggaggctggtgcgggcttgttcacaaagtggcagtcttccaagagggtgaggggcaaactctgaggccaattgaggtagaggcttggaagttacacagcatctcttcctgtgcattctgcttcaaagcaagtcaagagcccagcccagattcaaaggatagggaaatagactcatgtcttaatgggaggggcttccaggaatttgtggccatatttaatccactgtagagtggttattctcattacgaaacattctttattacaacatttagtatggctgtaccttaagtagagcctcctggaatagatttaaaaggttgctcaactggtaagacccacaaatggagagctgccactgctttccttagttctttgtctgaccaccagatggtggcattgctcagtcgaccccgagtatttcaaggccggcaccaaattccacctggagatgcccttcaagctgtgggaattctatgattttgcacagctggattgggagcaggcagtgctacctatggagagggtctgggattagggttgcaatgggcattggatgcctctttctccctgactcttctagaactgttgtgggaaatttcttcacctccccaaatgggggactggagtaagatgctgcaaatatcatcccatcacaatggactcaatcatgaagaaaaatatcgtttgtaataaaaaaattgtttgcatactcatgaattgtctatcgaaattacattgtattgatttcatcctagtgatgtaaataattctataccacttctttttcttttttctaccctctgcaccattatagttgtttgtataacagtgtctgcaaaaactgataacatttgattaaggcctgcagtctagtccattgtattgtgccagtgtcaatttcctggttttgatcatgtaatatagtgatataagatgttatcattggggaagataggagataaggacatagacctttctgtactatttttgcaacttcttgcaagtctataagtatttcagaatagaaagttaaaaaaataccctcactaaaaataacctccacctgcttgtgtattactggtatttgcatcatcatttgggagaaaagttgagcattgattttaaaaactctttttttgggggggggggtcattctggcagggtagcactggcttctcaacccccttcagatccactggccacttccacagatcctgcccaggctcaaagcacctgctagactaggtgatcagtggtgcagagacctggagccaaggatggggagagacagtcattgccacctcctttcttccctttctggactcagagatcctctgtcccaagtttctcccttatagtcagggctctgccctttactactcactttcttgtttgttgtcttaatcgtgggttacaatgcttctctaagactaacaggaagacacttttatttccattttgtgaataagaaaactaacacccagggtttgaggtacttggctgggaccaaaagtaagtgatgcatccaaggctagaaggtagattaaatgactttttaatctgggttttccttgctaatttctaaatacactaaaaagagaaaactttttagaaagttttctttctgaaagagaaagccttttagaaagttttctttctgaaagagaaaactttttagaaagttttctttctgcaagagaaagccttttagaaagttttctttctgaaagagaaaactttttagaaagttttctttctgaaagagaaaactttttcaagtgaagtaaaacttctttgaaatattacgtgtttaaactcctaggctgtaatttcatatgcttttatttactgtcttgttctattaaaatgcaacctatagcaccttttaatgttcacacagtgtttgaagtagagaaatgaaacttttatgagtaagtggagaaagtagtgttaactttttttttcattaatgagaaaacaataggcagcaatgggtttaggagttctatggcgaaaaggcatttcctgagattgaatcagtggcaaaaggagagcctgttatgttttgctaaccaaaagaatgtgggaacattttagctaaaatgcaagttaaaactgtgaaacatataaataagcatttggtatgcttttcagtttccacaacagtagtcaagccagtgagccctgtggggagggctcatgggccctggactcaaagagctcagagtatgtctacctggggaactaaaccagtgtgcatgaaatgaccagagagtgatatggggcagatagggtttcatgccagggtgtgtaccatggttgtgtctggaaacaagggctaccgaggcctggatcactcagaggaggcatcagggagaatgtactggacttgggctcaatgtagagatgtagggggtagctctcttttgactcctaaaattacagtgaaaaactgggttctcgtaatcacacttacgagttgttgtgtccctggactagttatatcttctctctctctctctctttctctctctctcgctctctgtgtgtgtgacaaaatactcataccacaaaatttaccattttgattattttaaggtacacagttcagtgccactaagtgcatttacaatgctgggcaatcatcatgactatttagttccaggaccttttcattacccacaaaggagaccatgtgcccattaagcagtcactctctccttggcaaccacttaatgtggttttcgtctttatggacttgcctactgtgtgacacacagtgttttgtggtggatgggaaaatgtatgatatttaggccttactctcaaggagcttactaattgggaagatgtaatctgagaacatgaaaaagacagttacatcctatgaccaacatcatgcttgctgggaaaaccttagaagcattcccaattacagtcagaaataagataagagatgctaaatgtcaccgctgtgattcagcattgtgctgaagaacctagccaatgcagtaagacaagaaaaataaatgaagcacaaggatggaaagtaagagacaaattattgttatgtggagatgatatggttgtgtactttcaacgagttgcttacctcttttattatatgtaatacttttggaaattcagtgtccatgtacagaaagcaatagcatttctgccgaactacagtaacctataggaaatgttatagaaaaaaagatacagttcacaataacaataaaacaatagggtacctagaaaaaaattaaataaaatatgcctagttctttaatagaaaaaattataaaacataaagtatatcataagtagaatatgatatgttcgtagataggatagctcatttgtgtaaaagtgtctcattgaagacaattccaataaatatcccaacaggatttatcttgcaattacagaaaccaattctaaaattgatttgaagagtaaggtacatccacaggtctgatatgtctaaaaaagaataaaagggtcaagaaagcaaatgaaagagcagagaaacaggcctaagaatcactgtgaatttaatactagataacagtgcatgatgaatgagtgggaaaggctgagcacatcattgacttatcttgagacaactagctttctataaaaaaagatactagatctgcatctcacaacacataccaagataaatctcagctaaaccagcatgtgaaaatcaaaatgttaacactgtcagaagccaaccccgggagaatatctttatgacctgagaggttaaaaagaattccttagaaaggatccaaaaaacacaactcagaagtgaaaaaaatgataaatttgactaggttaaagtattatgatttataggtgtataatataagattatggcctagaagtatacacataggtgttgcctctggacacagagtgaggggagagaatgggacaggggacatcagctttatccatcatgtgaaaaatgataaaaatgttaacattggttaatcctggttggtggggacacaagggcttgttacacttagaaatatttccatgtttaaaaaatttttaagacaacacaaagcaactaccaacctcagcatgaaaggtggaaactatcgttgtatagggggaaattgccaaacccaaaatcctgattgatcttatcactgccatcagcaagctgcgtccatgggtgaggaccttcctctcaggggctgtgtgctctggaaaacaagagggttggactgattactagcttaggtcctcctcccttgccagcgctcacattttctcttctctctgtggggcaggttacaactgctagaggagcagagaaggaagaacgcgtggggaagagcatcgtcacaagcattaagttctatccaagcatggggaaattgttttcattgcattcaattcttacttacccgacctcttaattcatagatgctgcctgatttcttttaagctctagaccttgctgttttccttgacagggtgaaactgggtgttctgtaatgaaatgtgtgctccctgacaagtggcagagattctgaattttctgggactgactaggagcatcatgctgctgacatcagtgtacctgcttaattgggcttcattattggtctgaaatcatgaggcctttcaggagccaagaaatacacctgggtatggtggggtgatgaaggaagggtgcgatgggtctctaaggaggtaccagtgttttaagcaaggtggtcatttgtgggctggtaatttgaaaatgggagttgtggaattctgctttacctgcagacctgctgaccacttctgcctgagttttctcatctgcgaagtggggcagactagagtgacgtagggcatgctttcctttttgccagcagagagagggctttgaaggtaagaggaaggtagtgtggttttccactggggctacatacttatagctatcactgctgtcaatctaagcagggagtataaccaatgtctccatcatcttaagtaatttgtgtgtgcacagattcttcagaccttacaggatgtctctgtaaaacctgtctgggtgctagatgacaagaaagtctgagtggaaaggcaaggccttctctaagggcccctctttaccacaggaatgaattttaagagactgtgagataaagtgacaaacataaaaagccatgtttattcatctccacagcatcatttcacaaagcccctaattctgtgatgacataccactctccaaaaagatactttaaagaccaaagaagataaaaaacatgccccccatgtcttttgcctaagtcactatatttcctaaaagagaaatgaccccagtccttgcctttcctacacataaaataatgtctgacaaaattcataattatgcctctataatctgtaaccaaatatgttcttgcacctaaaccgtcatggcaagcacactttggataaatcatttaacttcattagacttcaattgcatcatccataaatgagttataatagtaatttacttgcctttagacagggactggatgaaaccatttttggagaacccatctgtgggtttttttgttaaataacatcaaagtttattgggtaaaggaccaatattgtaaaatagaaattaaaaaaaactctattgatgttgggttttgggaaggaacttgggggagatagagcagatcctctgctcaggcacactttttttttctttctgaaagactgttttttttagagcaggttcacagcaaagttgagaggaaagtacagagatttccgatatacccccgcctccacacacacacagcctcccctatggccaacatcccccaccagactggtacttttgttacaattgatgaccctacattgactcatcataagacccaaagtctgtcctttacactggggttcactcttagtggtgtacgttctgtgggtctggacaaacgcatgatgacgtgtatccatcattattgcaccatacagaatagtttcactgctctaaacaccctctgtgctcctcctatatatcccttctccccgctaacccctggcaatcactgacccttttactgtctctatagttctgccttttccagaatgtcacatagttaaaatcatacagtatatggccttttcagactggcctctttcacctagtaatgtgtatttaagtttactccatgtgttttcatgacttgatagttcatttccttttagtgctgaataatatcccattgtctgaatgtattacagtttatttagccattcacctgctgaaagacatcttggtttctttcatgttttggcaattctgaataaagctgctataaacatctgtgtgcaggtttttgtgtgaacacatgtatggatttttgatctgctaaacactgaactaagaagatttctggatatagatgtagttgaaagggataaatatgtacttatttttttccaatgatttttcattgtaaaatattgcatacacacccaaaaatacttaaggcatctatgcaaagtttaacaaataaagcaaacacctatgtatctatcactgggtcaataaatgggatgcccctggcacccagaagccctcgagggtccctcagccatcccagcctccttcctcacttacacctttgtgtaatttccttgcttttctctataattttaccacttgtgtttctattattttgagagttacatgctctattctagaaattataatacatatatattatatatttatacatatatatatatatatatatatatattttttttttttttatgaagtctccctctgttgcccaggctggagtgcagcagtgagatctcggctcactgcaacctctgcctcccgggttcaagcaattctcctgcctcagccccctgagtagctgggattgcaggcgtgcgccaccatacccggctaatttttgtatttttagtagagacggggtttcaccatgttggtcaggctggtctcgaactcctgaccttgtgatccgcctcggcctcccaaagtgctgggattacaggtgtgagccaccgtgcctggcgaaattataatatttatactgacagtctaaagtttatcaaagctttcatttcccatagagtaactcaaggtccttggaacactctaaaaatgtttaaccactcccaacttattttctctcattgttttgtattttaattctatatttttaaagaacaccaacaaaatatattgttctacacagtggaagttcatttggatttactcatcatgcatctgtcactttctttgctcttcattcctttttgtgtttccagtcttccatctgggatcactttctttctgcctgaaatgtaatctttagaatttcccttgctggtgaggaactctttgcgtgcctgaaaactcctggatttcacttcactgtggcagggtatttgtggcagttgtcttagttttcactggttgctgtaacaaattaccacaaacctggtgactcaaaacgacacaaattcattctcctttgattctggaaggcagaagcccatcatcagtttccctgggctaaagtcaaagtgtctgcagagctgcgctccatctgcaggttctaggggggaatcttttcttttcccagcattgcgatgctgcattccttgcattgcttgattcatggcccccttctccatcctcaaagacagcagccattgtagcatctccaaatctctctcctgtcacatcaccttctctgtgtcaaatccctctttggcctgtataacacttctgactgcacttagggcccacccaaatctacccatctaggttatgagatctaaattctgagatcctcaacttaatcacacctgcaaagtcttttttgccatatgaggtaacactcacagcttccagggactatgacctgaatatctttgggggtcattcatctttcctcatcagaattatagatttgtcattattttctttcagcgtattaaagatattattccactgtcttttggcttccatttttgatgttgagatattttttagtctaagtatgatcccttttaagataatctgtatatttttttctctaagcttttctcttggttttaatcactgtgatcactggtaactacgatgggtctaggtgtacattccttaacatttactttgcttgggattctctggtcttttgaccacttagtgtctttcaatagtcctggaaaattctcagcttttatcttttccatattacctcattcccatccccattgtcctcttttgggactccagtcaaatatatgttgggccttctgacttatcccctatagtctaaatccactcttctgtgctttccatatttttgcttttgatgctgtattttgaacaatttcctgtgatctaacctctggtccttaattctctcttctattgtttttaatcttttgccaaacacttcaataagattttcatttgtttttaaatttttcctttctagaagttctgtttgattcttttccaaatctactaagtcagtttttacagtttttggtgctctgcagatatttgcaagcttgtttactttttcatgtggttagcaaatataaacttactgagtttgcatctgaagtgtgtccaggtcggtttctgctctctgctgtttatgctggttctcactcatgttgccttatttccttctatgcctgatgatctattttctgatacgcctgacaatttcactagttattgcccgtaaagaaattatgtgtggagatcccctgaggcttagaatgagtgtgctctccttcctctggttgccttttggagtcactacaaatgaaattcattgtccatgtatgatatagaaccctggggtgcaaatctggatgagggcaggcctctggtcacatctcaggggtaattttatccccttcctacttcctctcttgctttgctcaggtttctctctgggcctatgggtttgggggggacaggaagtgacatattactcctggttcatcctaatcctgagggtgtggccctttgggacccagcttactgtaggtatatgtctcctgtaagagtctacatcagatgtgctctgggccctgacatctttcatccttacccctttgatgtctgcaaggcaaaagcagctttggcactcaaatcatcctcgagtctctttaggttaaagctttctccctaaatcagcctggtagggatgtgctatcattcagctcttcagtgtttttatggttacttactcagagttgtttttagctgagggctcatccaataattcaatcacctaaccttccctcgtaggaaatagctattacatttctattgtgtaaaattttacaattgtgtttaatatttatttacaatttaataattgtgttatgtgtctttaggaaatttagaaatttacagtgcagaaaaaatcaagggaatgtagggccacaagtttttatttgctttaagatattagtagccacatgggatattgacctggtgtcccatcttgggggaaaaggtgagagacttttactggttgcacattaacactggggaatggaaaagcccatcttgtttgatgccatctgttgtttcctcaaggggtaactttaattggttggccaataagtttcatccttgccttaaaaaaaatgaccaccaagggaaaactactcttagctggcttcccaaccacctcagcctggccctgagctgccctggagtggccaccatccagccccttcaagttagggcagctggctttgattcaggctgtggagacagcgttagtcagcagcctcttctctcatgcatgccctgatctttaacgctccaacgtgcatctgtgacaatgacagcggattcctgactgtggccatggctcaggatacttcagtggataaatttgggccaggtttgtgagtcccatctttgggctcccctcaacatcacgatttagccagttggtgttggatcacgattttaaaactttaaaccttgagtgttaagaatgaattcttgactgttcagtcctcatatcccagatttggatggaaacctctgatgctataatcaacatgaggaaaagcctgtaaatcatttacagattcagaaaacacttaatggacttctcctctgtggaaagcaccatgctgggtattgtggcatccgtgccctcagaacgcttctagtcttttcctatacagagaacacaagtatgcccacctaagagagaagctgagatttagaggagccactgaggatggctgtgaaagtgatctggctaggatgtttgtcatcccattgctcacgaggtttgatgtggctgatccgcctagctggcatctcttccctcctcatacctcaatgcacattcctcccacatctgggctcatggcagtgaatgtgacctttctgtccagaggagttctatcatttggtcaaggtagggaggtgattgtgcttctctgtttaagacttagcaaaagacaaaatgcagaaagcctgaaggtgggagctaatctttctggctgtcaccaggtcttatacaaccttgtggttgtcacgatatatgcatcagagcagaccccatttcctggaaatcatttcataatggatactggaatttgaattaataaaacttagaaggacccaaacttggtatctccttgccaattctctcaaaattgagtgttctgcagtgttcctacacaagtgaggttggtgcatttattaattaatgtcactaagagatcagttaaagcctcagcaaacaattgccatgtgctctttcagggaaaaacaacttacaatcagatttgttccctcagcaagaattagaggatatactgccaaagtttctccaagctgccccctctttttcttggcaagctattgggctgttagcttccagtcccccagcttccttgactatgaggattccttcctagtgtggttcagagcacagattccacctgcttttattttgctttctaattgcttattattctcccaagcacacactgtttttctttgctctattcctctatgttgctgaatattttgatcctaaacaaaggtgacttttgtactcagcttgttatgaaagatcagtaatatgtgacatgtgatatgttttccaacttttatatctttatactccctgagtgtttggccatggggttcatgttttgctgagtataatacccttgccattcaaattttaattgaagtaaatagtaaaacaaagttggagtagagtgggtctttctccttctcctgatccagaggaggcacccaaaagtactcacagaatatgcgaagtattaggatactaacttcttaaacttaggatagattccatcctattacttgtttctgtaggtgcatgtggacaaaaagtgataccatactgaagactgtctaatgctatattagaggatattttggtcttttgcaaaaacagagaatgaagacagtgcaaagtgctaggcacagcactgggcattgactgttggggaataaaaggcaactggtgttcctagaggagaattagaccaagttggactttgtctactctgctactccgtcagcactcagcctcccagatagatgctcctcatggggcccatgcttagacattatggtggcccatgggaagattagctgcatctcttttgggtggcttttgtcctctaactccagagtcatgggatagaccctactgtgagttgtttattcaaaatattgagctctgcttgtggcagatactgtcataggcatagggcatacagcaatagaaaagacaggcaagatccttgttcttttttttttttttttttttttttgagacagggctcacctgtcatccaggctagagtgcagtggtgcgatctcagctcactgcaatctccagctcccaggctcaagcaatcctcctgtctcagcctcccaagtagctgggactagaggtgtgcaccaccacacctggctaatttttgtattttttgtagagatgggttataccatgttgcccaggctgatctcaaactcctggcttaagcaatccacctgcctcagcctctcaaagtgttgggattacatacgtgagccactgtgcctgccctaagatccctgttcctatggagcttatattccaggggagggacaagcaataaagtgcaagataaacaaggtaattttatagtgataaagataggataagggaggaggtcagagagtaaaccatatgtcctgctttagaggagtccacacgcccatacaaaatccagtaataggatgagatatatccaaagtttaaggcaggacatatggttcactctctgtgaggtggcctctttgagaagatgacagtagcactgggacgtgagtttgagactcagtcacatgaagatatgaagcgacactgcccagcagaaccctccacctgccgccgatgatatgtgctgtctagcatgataatcgctagtcacatgtggctgttgagcccttgaaatgtggctaacgcaactgaggagctgtgttttaaatttaatattaataatttaaatttaaatagaaaaatgtggcaaatagctatcctattgaacagtgcagatgaggggaaggacgtttcaggtagggagggcagcttgtgagaaggtactgaggatatgtcaccctgtggatccaacatgagatccctgactggaagctctggtcagtttttaaagagcaaatctggaaaatttaatgatgtttcctgcttctgttttatgggcctctggagaacctacaaaggaataacagttaaccagacaggagttaaaatccctgctcaacaaagaacctatttcctttcctaggaaggactcattccacattggctgactcacaactcttgactggtttcctctgctaatggctgtggccagcctttgtctgtgcaggatgtagccttttcggcgctgagcttgttcgttctgggaacgaatcctgcctttgttctggacttgcatcttctggtaacaagaggctggaacccctaccatggctccttcaaggtgtctctttgtattccacatacaactcctccatcatcctagggggctcagacctcatcttttctggcatagcttttctattttcctccattgcaaagatagagtagtcagccctggttttaaagagaaatcgctgtttagagagaatttcaccttgaattgccactttatgttgaaaggattaagaaagaaaaggaaagaagaaataagagaaaaagaaaaggccccaggaatgtttccagtggttttcttacatgccatatatgcattgggatctctcaggccacggaagcctctctacctcctgggcaagaattgggctatttgaagcagccactggctagtcccagcaggggcagagggaggggcaatggcagggaccggctctgtccatccagcatggatggagattcggctccagcaagattgccaggcgaaaacagagatgaggttgccaatgctggctcagtgtgctgaggattagaggaggctcagctgcagagtctgtaatcctggactagcctggatttgtcattggtttaatgatgaatctactactctctttgtacttacatagcccaagaaaaaacaatgacctagtaccaccctgaaaggtgtaagaaacaaagcaaaggcaatccaaatgttaaattggaggccacagagccaagcccacctccatggttgagcagttactctgcctccttcctttggtcttacctgactgtctgcaattagctcagtggtggtggggggcacaggggaaggctgtgagcttcaagccgtggcatgtaccaagaagctatcttgatgttgatgaccttggtccctctgatggacaagtttgagatcataaaatgagtacctgtgatgactgaacaatgtgctggcgtgttccatccccttttgcaaagaaccttcccagaacataagtgtgaaaacccacctgaatcgggtgctttggcttcatgtgtaaacgtggcagtgcttcacgaagatccctcccatgcacatgtgcattgcccttactcttagcacctggttctccaggagaggaaatcccttctcccttcttgggaaaggggctgtgttagacactttcatctgaggggttcattggaagacactataagctacatgggtcaatattagcccagctgaattccatcatcttttttttttttttttttttttttttttggagacagggtatctgttgtccaggctggagtacagtggcgtgatctcaggatctcagctcactgcaatctctgcctcctgggttcaagcaattctcctgcctcagcctctcaagtagctgggattacaggcactaaccaccacgcacggctaatttttgtatttttagtagagacgcagggtttcaacatgttggtcagactggtctcgaactcctcatcttgtgatctgcctgccttgacctcccaaagtgctgcgattacaggtgtgagccactgcacctggccaggaattcctttgtcttataaaaattatttttaattttaaaataggtatgtttattaaagaaaaattagttggccaggtgcagtggctcaggcctgtaatcccagcactttgggaggccaaggcaggcagatcatgaggtcaggagtttgagaccagcctggacaatatggtgaaacctcatctctactaaaaatacaaaaaaaaattagccagttgtggtggtgggcacctgtaatctcagctactcaggaggctgggccaggagaattgcttgaacccaggaaggtggaggttgcagtaagccaagatgatgccactgcactccagcctgggcaacaagagcaagactccatctcaaaaaaaaaaaaaaaaaagaaaagagaaaagaaaagaaaaattagcctacagccatactaccttgaatatgtctgatctcatctgatctcagaagctaagcacggtcaggcctagttagtacttgcatgggagaagctttagaaaacttacaaaaggaaagaagggaaaaaaattacctatgattctaccatctaaacacaatgattcctgttaacggtttggtatgttctccaataggatttctttcctaccagaggaaagccttttacatggctgtaactgtaatgtatatacaattttgtgcactggttttagatttaacattaaatagtaaatgaatagtaaatatcactttttaatggcagcatagtatgtccttaagttcctgtgtacttggcacttgggcgacttaagccacaaggactcagtaacggttgaaggtcacacagtgagtgggtgatgcagccagccgtagcccgagtctcccacctcccaggtgaacactcattatattcactggatctcagtctttccctgactttgtccccacacgtggggtgtataccactgccagttgcctcctccttacattattgtgttttaacaccctcttctacttccagtgagggccactataccacccgctgcaggacatgtccccggcatggaggccagattatccccgtctatcctggtaccggaagagacccatagtatcataataaataacagtattcatgggggccaggtgtgccatgtgcttctcccaacccagcttccacctcttaccttaatactagttttggagtaaaaggaaggattaactgacatggcatagtggctcatgcctgtaatcccaacactttgggaggtcgaggcctgcggatcacctgaggtcaggagttggagaccagactgaccaacatggtgaaaccccgtccctactaaaaatacaccttgtgtactgggaggtgctttagtggaaatacaaagtctttggaatccaacaaacattgtttcaaataaccacatactaggctttgacactttaggtgaggtactcagtcatttggagcttcaatgttctaatctgtaaaatggggatagtgatcttaatttgttttaagacttgtgaaaatcaagagaatgtgtgaagcaggtagcataattagccttgtgcacccagacttactgcctaccacatgttccccactccttccttgcctggcacagtgctggtatacagtaggtactcaatacatgcctacgacattgaactgaattttcatttgggatgttcagcttgtgcgtcttcatttccagattggaactggagttgtgtcccagtctctgggtaagagctaggaccatacaattagaagggcttattctaagtattggcatttattctcctgggaattgcactccaggccgtgtatgagggttccttttatttcaataatcaagctcacattcagtgtatcatgttacggagctcacaatagcagatacacagctccggctgtaccaggtgacacgtggctcctaccagaatcctgaaggtaggcacggtcctcatccttctttcctgtggctggctgtggctggcaggtttcaggtgtttgtttttaaccactgcacatcactgcttctcccacaatggcagacaggagcagagccttctatgtgggtttgggaagatgtgtgtggtggggcgcttttcaataaactcttagtctaagaaagttctgggcataatgaaagaagacagagagaggaagggccaaacctgctgattggagtagagcctggcagcttggggaaacctagtagaccatgggaaggactcaaggccagaagagaaaggcagccacggccaggctggctggttccctcaggtcaggagctgggactggcgcttttaggtgtctgtgactgagtcagcggctgaggccaacggagcctgggacagcctgtgggctgtgactaaattaggaagaaaaagcctttgggctctcctgggaggtcactggggcaggtggcccatggaagagcctctggtgggcagctagaaacaggctggtcaaacatatccgactggctttcactttggtttttcagtgcgactatagaaacgtcacacaccgggtctgaattcagtcccagcaggagggaagcccccctgatgccaggataccccaagccccatctcctccaaggggctaagttaaaataggagaatctagtaagcctcaatcactaagtcatttataagctcactggggagttttgaccttttaaaaggaatataccctattgactgttttggataggagattacagtggacaccaggcattgcaggtagacatcagcctgtcccagacaggacaaattggaatgatggttgctttgcataacctgacaatgaagtacctgtgacaacagattttgattttagaaaatcacgtgaaggttgagtttggtttgagtgtttaaggattacagtgtgagatttggaaggagaaaagtaaaaaaaagttggcaggagaacggtggctcctcggaagaaaagttacatttctaagtaatcaaactctgaatgaggccagccagggtctttagccacttcctcacagagaggggcttcttggcttttttttttttttttttttttttggtattgtactttctgcaagactggttgaaggcgttagcctgagagcacagtttctcaactgcaacactattgatatcttgggccaaataattatcttttgtggtggttgtcttgagcattgtaggattttgtcagcatccctggtctctgcccagtagatgccagttgcatcccatcacccccctcagttctgacaacaaactgtttccagcattaccctgggggccaaaatcatccccagccactgcttagagcaaaggagaactcacttttcctcctgaaaggtattgcagttaccactgggtaggtgaaatgatgggtcatctccgttcatctcctgttccacaaaaataaagaagggcaagtgtttcaggagctttgctggctgggagtcagtttgctggggttgtctgatgtagctggattgctaaggtttttaagggtatcttcaggaccaaattttcacccgtgaaaacccagagtaaaaagcaagcaagcaaacaaacaaacaaacagaccaccaccaccaccacccacagcagcaacaacaaaaaatagggaagtaaaccaggcgaggctttggaattttattaaaaatggtcagcgcgatcagacctagatcccttcttctgaagtgctctcaggagacctgtctccatagagctggcttgggtgttgatatgtgaagaggctgagaacatgtggcataaacatcgactgatattgtttgccatttacactcagcatgtgtaatgcagcaggaatggctcccggtggcatgtgactgcccttccaggcgggtatgccgtgctcaggcactgctctttctctttcgctccctccctccctcgcttgcataccccctccgctgcccctttccagactcgagagagtttgagtgaaggcttgtcatgattggcatgcagaaagctggtagaatgtcattggaattttctagggaggcacatgcgcaacacccaaaatgactccaggcttcgatagccgcaggtcagcccgtcgtgccaggcaccctggtatgtttcagaaaggtaaggttgcatgacatcatcctacctttccccagcacaagggagaaatcgaggtttatttgtttcttttttaattctccagttcaggcagcacctctaaacatgttctcggcgctgagcatttgtgcatgagtatgcgatttgtctgtgtccccaccccctccgttttaaaaaaaaattaacaaatgattcacaacggcagtttaacatgtgacctaaaacagctcctcatgaccccagtgaaatcagcgatcctaatgtcaggaagtctagatgctctttttacgctggttactaaactcttctttaaagaaaagtcgcaaggctactggaaaacagattgagttatcaccagatctgggagaatggaaggggatgcattcagaatcccaaaactttataaatgatgggcatctcttaagggtgaggtgctttgtgttaattgctggaatttggcagtgatggaaaatgaacttaaaggtgtttgaaacatctcgtatgtgttgagtgttgactcattctggaccaggaggggagtgccgtgttaaaattcatgagcaggggatatttcgccaagaaacaaggcttgagaatagcttctgagcacccctgaagtagctggaatatgaatttcagcacctcttaggtatctttaagtaaagttaagtgtttaaacaaaactattttcattgtcgccaagcaagcaagcaagtgcataaacttctgttgtgcggttcagggtacaaatttggacatggacatgatggtctgttagcagactcaagcacaaccaaacatgactcacctcatttctctatctgatgcaattacaagtagcttcaacacatgtggtagaggaatactagttttctgcttgcaagtgtgtaaaagcaaatccatactcataaaacggcatggacggggtgtcttatatcacggagattttttttttaacctcaaaaatagcttttatgcagctttgccattggtttctgccttatatacattggaatcttttctttcttgcaattctgagatgtcagaaaactgaaggggagagggttaatatgttcacacacttgcccttcccccacatgcatatgctaacagctgccatgtatgatttttgtggaatttgatatttcgaatgaaatgacttccttattttccatagtaatataataatcaattttaccacagagaactgtgtacatgtcaagccttggctgcctctaattagcaatggatggggtagctggggaaagtgctggagagcagtttcaagtaaaaaaaatcagtcttcaagctttaaccattctttctggcctcagccaaggcagttttcaatctgcttggatcgtaaccacaggtttagtttgtggtattctaagaaaatatctagaatggcacatgcaaatgtgatgaagatgggcctgtgtatctaaccgttgtgaggttgtcttttagctctactctgcagtaactttgtttttttttttgttttttgttttttgttttaattgatcattcttgggtgtttctcgcagaggggtatttggcagggtcataggacaatagtggagggaaggtcagcagataaacaagtgaacaaaggtctctggttttcctaggcagaggaccctgcggccttccgcagtgtttgtgtccctgggtacttgagattagggagtggtgatgactcttaacgagcatgctgccttcaagcatctgtttaacaaagcacatcttgcactgcccttaatccatttaaccctgagtggacacagcacatgtttcagagggcacagggttgggggtaaggtcacagatcaacaggatcacaaggcagaagaatttttcttagtacagaacaaaatgaaaagtctcccatgtctacctctttctacacagacacggcaaccatccgatttctcaatcttttccccgcctttcccctctttctattccacaaaaccgccattgtcatcatggcccgttctcaatgagctgttgggtacacctcccagacggggtggtggccgggcagaggggctcctcacttcccagtaggggcggccgggcagaggcgcccctcacctcccggacggggcggctggccgggcggggggtgacccccccacctccctcccggacggggcggctggccgggcagaggggctcctcacttcccagtaggggcggccgggcagaggcgcccctcacctcccggacggggcggctggccgggcggggggtgacccccccacctccctcccggacggggcggctgaccccccccacctccctcccggatggggtggctggccgggcggggggctgaccccccccacctccctcccagacggggcggctggccgggcgggggggctgacccccccacctccctcccggacggggtggctggccgggcagaggggctcctcacttcccagtaggggcggccgggcagaggtgcccctcacctcccggacggggcggctagccgggtggggggctgacccccccacctccctcccggacagggcggctggcctggcgggggctgacccccacctccctcccggacggggtggctgccgggcagagacgctcctcacttcccagacggggtggctgccgggcggaggggctcctcacttctcagacggggcggctgcggggcggaggggctcctcacttctcagacggggcggctgccgggcggaggggctcctcacttctcagacggggcggttgccagacggagggtctcctcgcttctcagacggggcggacgggcagagacgctcctcacctcccagacggggtcacggccgggtagaggcgctcctcacatcccagacggggtggcggggcaaaggcgctccccacatctcagacgatgggcggccgggcagagacgctcctcacttcctagatgggatggcagccgagaagaggcgctcctcacttcctagatgggatggcggcggggcagagacgctcctcactttccagactgggcagccaggcagaggggctcctcacgtcccagacgatgggtggaggttgtagccagccgagatcacgccactgcgctccagcctgggcaccattgagcactgagtgaaccagactccgtctgcaatccctgcacctcggtaggccgaggctggcggatcactcgcggttaggagctggagaccagcccggccaacacagcgaaaccccgtctccaccaaaaaaatacgaaaaccagtcaggcgtggcggcgcgcgcctgcaatcgcaggcactcggcaggctgaggcaggagaatcaggcagggaggttgcagtgagccgagatggcagcagtacagtccagcttcagctcggcatcagaggtagaccgtggaaagaggggagagggagagggagggaaagggagagggagagggagagggagaactttcttatggccacagctttgtaagatagaggcaaaagccaaaagtaatgcacatataatattctctgccttgggcgacatctgtgttgtgttggctgtagtcagaaagatatgtgtcttaaggcaccagaaacttccacccattttgggaaagggatatttttctcaataaatagttatatggcttatttataaagccccaatcttaatgttctcatttaatctaaggagtgtaaaggaattaaactgtgcacattcccaaaacacacacggaaacatataccatgtccttcacaaggaaacagggtattctggtaagatctacattcccacatgcttaagacagtcataatttcaagtcagttgaaccagtatttgttcagtgcctctaatttgcccagtgttgagccacataggcacttgggagtttgaaagattctaggatgtggatgatgtcctcaaggtgcttataattagaaggcaaaactcctcccctagcaaacctcacctggcattctgcagcagaaactgtatgtgttctctgggggaaatcttgttgcaaaaaatatttatcgatttgcatgaaaaggtgccaatagagctaagaaatatttttagctgtattgtgtttgaccctttgtggacttgtgaccctttgtggacttgtagaaatttcagtgtttattcttcagggtcatttaagacaaatggtcatgctgtttggagtgacaaaaatggcttgtgggacccaaagtaataaagaacagattgattctattcttttatagattggtaattcttagactttgctgcacaattgttctcctggggagctattaatattacaaattccagtgcctgggttgagtcaatctctggaggtgggactcaagccccagttctttttaaaacttcccaagtaattcctaagtgccaccaagtttgagatctagtgatacagatgactttatcaacaaccttttttttgttgttgtttatttgtttgttttagcctaagccttctagggtgagttttggaatgggctttttataatgatgggggtgggtgttgactaaagaactttcagctttctggaagctcaccctctgttctctgtactagtgaactcagtgtagatggaggtatgctttctccctttccaacaaacctggtaatatgatgccaagccagtcactcaaccatctatgttacctaaggttccctgaaccttgagtgtttttattacagcagcccaaatgttctgaaaatcttgattatgtctcttaagggaaggtagttttataattaattacatgtgtcccttgaaattatttttacattgtctgaaacccccatggaagaggaagcccattcttggtgtacttgcagctagtagaagtagctcattaaaatacaggggttactcaattcctgataactcactatagattttttttttttcagacagggtcttgctcactcacccaggctggagtgcagtgttggtatcatagctcactgtaacctcaaaacccagggctcaagtgatcgtcccacctgagcctcccaagtagctgagattacagttgtgcgccaccatgcctggccaatctaaaaaatttttttagagacagaatctctctatgttgcccaggctgttctcgaattcctggcctcaagtgatccttctgctgtggcctcccaaagtgttaggattacaggtgtgaggccactacccccagccacctcactatacattcttagggttggaaagtattttcaaaatactctagtacagcggttctcaaggtgcagcatcagcctcacctggacttgttagaaatgtacatgttcacgctccacccccagatcttccgagtcagacacagagatgagggtgtaggtggtggtgaggggtgggcccagcatctgtgttttaggaagttctcctctccgggtgcccaccaaaatttgaattactgctgttatttcaccttgtcagaaactgaggtaccccagtcctcagatctgtctctgcaccatggccagatcatcctaacttttctgtgtcatgaataactgccttaagaaaacacccaccatcctaaaatcataaggcataaagaaaccttaaatgttgtctcatctgaccctcccatttcacagatgagaaaactaaggtcgatagggtgacatgaagtcaataagatgtagagttattggtgacagagcttttggtctacttaaaaccgacacagtcttcctcccccactggcccacattgcctctccagttttatgtggacttctagtatttggctgaaatcacgtcagttaaaatgtctaggttaattgtcaggcaactctagaaaaagaccaacagaattttaattctttaaaattaatccaaaattctttcatttcaaattggcttgaattttataactgtctttgtacatttaatagaaaaaaatatcggtgatgtaaactgctgaaaagaaaattcacagaacatggggaccagtcctggaacataggtttcatcccaacatcgtgtagattaggcacttaacagcgcctcagaggcacacactgaaattgcattttcttccgatttggttaaaaggaaaaacgtgacaagaagtctgtttgttgaatactttacaattttatacttgatgtggttagtgatatttacataattttgtccgtgttcaaagactgaatctaatccacattctctgtagagcttcatctttcaaagcattgtagcaatacacagggaacattaagccaagaaaacgaagggagaacacacagctattatctacatacacatatacatggagcaggcatgtccatggataaatttttttttggttttttttgtgggtttttttgagacagagtctggctctgttgcccaggctggagtgcagtggtgtgatctcagcgattctcctgcctcagcctcccgagtaggtgggactacaggcgcgcaccactatgcctggctaatttttgtattttttttagtagagaccaggtttcgccatgttggtcaggctggtctagaactcctgaccttaagtgatccgcctgcctcaccctccgaaagtgctgggattacaggcgttaagccaccatgcctagcccattgaatagaagtgtttattggttccacacacctaccatgtgctaggtattgtgatgtggtgtgggacacatatagttcctatcttcgaatgatcatgggacagtgggaaagtcagacaagtgcttcagtagacaattatgagagcaggtggtggagttagaagagagtacagttgaggctgatggagcagaagggcattctgaagatcatgaaagggacatcagtgcacactggatgggagcagaaaccagagaaggctgcctggaggaggtgtcctgtgagctacatttcaaagtatggtagatatctaggtgaaggggagtagggaggaggttgtgtagggagaggggccagtatatgccaaggcatcaatgcttgtgtgtacattttctatcactgggccaggattgatctataaatccctatgtatttctttgtgtgtataaacattagcaatttggtttcttagagaaaccaaatgctttgcatagcagttttaaaatatacatttcgaaaagctcatttttccattacaaaagactcagatgttcccaagaaaagtttctcagttgagaggtcaccagatcttatgttaccgagaaaatggaaagatttcccctaaccccagaagtcaaaccagcttcctcaatttgagactgcacaaaaccaattaatttttgcccattgtggattttcttaataattgcatctccgacaaaccaactcctgtcctaaatggatttgagccacatttcactctgaaagctgtgggtccatctgggaaatgtctttgtagatgagagaattttataataaagtatttttggtatttcatttactaaatcttcagggatataggtaagagagcctccgtgctgaactgactgcctaacagaacaaggttagagagaatgaaattatttcatgctgtctggcctgcaacacatgcctctgaacgaagccatatacagtcgcgggtcgcataatgatgttctggtcaataacagatggcatatacaatggtggtcccataagattataatactgcatttttactgtacttgtctaggtttaaacatatttagatatgcacaaatactcaccattgtgttccagttgcctccagcattcagtacaggaacatgctgtgcaagtttgtagcctaggagcaatagggtatatcatatagcctaggtgtgtatgtacactctatgatgttcgcatgacaaaattgcctaacaacacatttctcaagacatgtctctattgttaagcagcacatgactgtatatataacaatggtttctttaaaagcactcccaggagtggccaggtgcagaaatagctgaatttgtgagcaatgataatgatagttaatataattatcatattttccagagcacctgcacatcacgtttgatctttacagtgagtggaacagacattacgatctccatttgacagatgaggaaattaaaccttagagttatcagatttcaaaggtgaagggaccttagagatcctttcatccagctttctcattttacaaaaaaaagaactccctgagatccagggaaactaactgacctaggatcccacagggagtgaataagggctgttgggccaggcccaggtcttctgatttctagcttcctgattttgcactccattgcgctattctcagtcttcagtgtgttagaggaaacttggtaggttatgcatttgttcttaaggagaaattttgttgatatcagtcctaggcactattttataaatgcacacatgtggaaaaatcccttattttcctgctttttttctatatatagatacaggcagatacacagacagatagacacaccacatgtggatgtcactggggagatgaaggtgggattgaacttagcagagtctcaaagggggcttcagctttatctgtcaaatattcttttattaaaaaattttgaagcaaaatgaccattacagtagcatttattcattttggataatgggcactgaattcataagtgtttgttttcctcttcatatttctgtattttaaaattttcaaaaaaaaccaaatatggatattaaaaataaattctcacctataataccataccctcattttataaaaataaagaatattttcaaagaaataaaaatggttcagaaggatggaaagaaaactatactatgggactcgttagttaagttgacattaatcctctgctttaagtctttcctgtgatgacactagcagaatgtgtatcattttctctgcatttgctgcaggatcagttctctttggcaggttttgagccgttctaataagtccagcatgaaaggcaggcctctcgtgtcagttctaaacccaccagctgccccattgtgactgcatagtcccctggttctgagactgtgctctgcctgataagcgacgtacggagcacagtggactgaaagcccggggatctgataccaaacatgttagttaaactcatgtttaactaacccaaactcatgtttaactggcccaaaggaagtaggcccagaaatgtggtttttggagctccctttaatgaacgtgtaaacagaggatagaatattggccttacagtttaaaaaccctccttcaagtcccagtcaagtcccttattcactggatgacctcacacggttcatctgatctttcttggtctcagtcttcttactatagactggaaatggtcatatttgacttagctgtccatatggctgttctggagatgagacagctaatgaagtgagaacactcattaacacaccaactgaaaaacacaaaacaaaagagagatgataggattatattgctgttatgaatcattccaagaggtgtcatggtgatatgaatcatcatatggtaatgtcatggctaaggcccaaacacagaatagcagcattgacccagtagtctcgaaattagtcacagaggccaagctagtgaagacccagcagccctattgttatcaagaaagagcactatccaaaaggtgtgtggcctcatcttctccttgcaaagagagaattcatctggtatatgttgataggcgtgtatccgaccacagctacctccatcagccctgaggacagaggcagcctgcattccagtcccagctcttctctgtctcggtgtgtgacttaggcggtttcacagaggacgccaacttcattggcttttgcggttttttgtttgtttgttttttgttgttttctttttgtttgttttgttttgtttttgtctgtagaatgagtgagttaaactaaattgtctgtaaggcctcagctcactcttaaagtgtgatcactagctagagtttgaactttagccccaatatgactgttgtgttgtcattgtcacctttgtaacctgacattcaggaatgtccctctctagttcatattctgacctagcttctgaaagcattatagcagagttgagaatttttgatctaggaaagataaatattaaaaagaaattcccaccaaaataccataaataaggaatgttttaaagaaaaatggttcagaaggaaggaaaactataatgtagttcttgttagttaagttgacattaatcctctctttgctttaagtctctcctgtgttgacactagcagaatgtgtcataaagacatggaaagatcataaattctcaactctgctctaaagatctgaccttcagcgttgcatttatttggccacacctttatagtgtggtcatacctagaaaatattttcttgcctggtcatcagccctctcacctcgattactttctatattttagcacaaaagaagaaatggcgcattcaccactcagccagttgcactggaagtgaatttaaattcctgaactggttatcttggaagatattgtgcttattgcagatgtggccggtgcatgagtttaggcactaccatgctctgggctgtggttcttggctcctgcttctggatggctggacattaccaggagagagcctgctgatacatctacgcacattcactctactgcacttcagctgtgtccttgttattccacagccctttaagtcctggttcaccaaccagatgttaagactctcttggatccctcaaatcccatccccatgcctgctgcctcctctctcagcagttgcccactccttatcttctaatcctcttttctccctatgatgatgatagtgaccctgtagctccaactactgggtcctcacagtcagtccactcctgcagaggaaactggagggtgaccaggaaccttcaagtcaatgtgggccacagacaggaaccgtctttaaaagatggttaaatgcccgtggtttacgtaggttggctttctttaagcaaataaaggaaatgcattgcttcatgtccagcaaagtacagggtggattcaggagaagctggctcaaggcattcctaggaagtcatcaaggagctgcctgtacctctgtcttcaggccagcatcttctgagttggctttattctcaagcaggctgtcattaagtgatggcttaacaacaatttagcaaccatggcatgacagagaatcatgcctgatagctctaacaaagtatccgagagtgttcccccatgagccaatcactgttgccagagggatgtggttcttggactggccaggtctgagacacgttgcttgggcccctatttgtgcagaattggcccctgactacattcccagagggtctttggatgtttggtcagatggtctgtactctggggggatcaattcataccagcaaggtccagtcagcccctacacctaccaccgcctctctagtggaagccacttttgcatctaattgtcttgggaattgtgttggttttctattgctgctgtaacaaattgccacaaatttaatggcttataataacatacatgtattatcttacagttctggaggccataagtccaaaaccagcctcactggactacggtcaaggtgttagttccttctggaggctctaagggacaatctgtttcctggtcttttctagtttctaagaggcttcctgcatttctttggctcatggccccttcctccatcttcaaagccagcagcaaagcatcttctctcctctctgacttctgtttccatccttatatcttctcgctgactctgatcctcctgcttccgtcttagaaggactcttgtgattacattgggcataccaaattaaattcagaaattcagataatcaagatctttaattcaatcatgtctgcaaagtcccctttaccatgtaagataacatattcacagcctctgtgggttagaatgtgaacatttttattattcagcctactgcagggattatccactcaatttaaaaacctgaacttagacagagaaagagtgtactgaagctcctgcattggagtgggaaattgtagatagtgacctaggaaggtgactttgtacctgcttgtaggtttagttttatttgcttcttgggtgtatttagattgtcctttttgagctgtttgtgggtttttctccacagaattgggtactcataaaagaggtgtccatattgcctcaaagccaccagattctgatgagccataccccttatcttccttcttcattttgttcacggcaattactttgtgcccataaagtgggaggcagtgtgctgaggaaatacaagattctccaagacacactcctttctcttgtggaacttatgtctggtggagtagaaaggcacgcacgcaattatttttaacccaaggcacaggatgtgctgagtgatataaaagtgacaaactaaggagtgggaagacagcaggagacatcagttccagcttccaggggtgtcagatcatgcaccccaatttttggttcagaaatatgatcactactatatgcacctcaatttcaggttattaactattgcaggctaagaattttagggctttaaaaatagtatgatgtgttttttcttctttgtctagggtgtttggatgaaagcaggtgctcagctctgatgattcatgtgaaatcacttctactcaaggttgactaaagttgggaatgatgaaaatttcctagtcaaagcaaaaattaagaagaaaacctggttagttttcttattttttgaggaatctgaatgggttaacgtctgtaacctgggccatactctgaaaaggacaggtttcccatggctgacctgcaaatacccagcatggctggctttcctagttggaaagcccttcctcacgtgtcctttcagtggcaaaggggaatctctactaagagctccctcctgcccagaatgcaattttagaaaatagagctgacttctctgggaaaaacaaaaccaaccttgtcttactctggtcatggaaaccaacttggcacctcattatcgccttgttagcaagaacaggctgtatgatggacaaacctgggaggaagagttggccctgtgtggccacggttttgagttaagcttaattgcttttctaaagctcagctacttaatactacacaagtcaaaatctatcatcagactcttgaccatccattctcctcttccttccgtattcttgcctacatagacattggtcgctccccattctgctgctgttgaatttgtgctgggtcacccagggacccccaaggcttgtttgcaaccagcccggctccccaaaggagaacagggctgtaactacctttaactttcagtgccctcttcccccatattttaaaatgcagccagcctgttctgcccttggagcatagcagggctgctggctggggaaggtggtgtctttttaacaacttataggcaatttttgatttttcatgcaaatgggaaagaataacaaaggcattttatctggctctcaaatgtgctttgtacttacatttaaatgtgggtgtgcctgatgttctgggaactcccttccaacaagacagtgtggcaacccatgtcacttgctatgtctcccttttcctcctcagctgagctagctcccagcctctctcgtttttgttccattatcattggatttttactgtacagaacctgtgacagtggagactaaggtgtcccagttgtgcagtgtctaccctgtactgcctaagcatgcttattgtacagcatgcattgtttatggcaactccaatttccagttttccagtccccttcttcccattcaaatgtcccagaattccagttcatcaacatcctgaacatatttcctgatgacacccacttttcagaggggaatttaaaacctggaaaatgtggtcttaaccaaagattccctccctgcctgtggtaaccacatatcccagatgttctgggaaagtctttccagtttccagaccatgcacactgatttttggtccagaaaccactataaccaaccaatataggtcacatgaaagacacatgtcagacggacaccctttctgcagtaagattcggtgagagtctgctattgtcccctacctcaaattcagatttttttacttgtaattttttggttattccttatactagttaggtttgagagctcagttgaagggaactgtgatattgtgagatttggtcttcctcaggtttcctagcataaaactccaaaagtctttggaatcggataaatatctttttgtatgctaataagctgacaaatgtctggcagccccttaggtatctttaggatggggtctggttactggaaagaccacagcaggatggaagggttgggactttcagcctcacccctaacctcagggaaggagaatggggctgaaagtagagttgatcaccaatggccaatgatttaatcaaacatgcctgtgcaatgaaacctccgtaaaaacccagaaaggactgggacatgtggaggttcctggagaggggggtgcccgagaggatgtgggagctctgtaccccttcccaaacactttgccccatgcacctcttccatctggtgttcattggcatcctttgtcatatatcctttctaataaaccagtaaaactaagcatctccctcagttctgggagcctctctagcaaattagtctaattctgatttacagccagttggtcagaagcatgagtaaaacaacctggggcttgtgattgacatccaaagtggggggacagtcttgtggggctgagccatcaacctgtgggatctgacgctttccccaggtagtgtcagaactgaattggcagacacccagctggtgtccactgcagaactggttgcttgcttggtgtgtggagaaaacctcccacacatctagtgtcagaagtggttcgtgttgtgagagtataggagacgctgaatttgtttgtgcctatattcagacaggaagacaattcatgttacttttggatgtgaaatgaggacaaggatgaaaatgtgtttggcacaaatgtaaacacgattcactctgtaggcaattgttaagcctgcctttttcacttaacattagagcatatagattttctcatgtcattaaagtggttttgtttttgtttttttgtaacagagactttggcaaattcaagataatgtttaccattggcaatcacggggaagggtgaggtggggggagcacgtaaccaagggagatttatcgtattggaatgctctctgtcttaagcttggtgctgtgtactcttttttgaatgtcctaaatgttacataataaagtagaaatttgaacaccaatagtaatggttacttaatattttattatgttggtgtatcataatttcctcagttcaaatcccatctcgctattgttggatatttgtaattttcaactttggactcttaaatagtatagtattaagcatctttgggtatcaaattttgtctgcatttgagctcattttctcagttttgatttatataattgaattccagggtcaaagaatatggctataataaatgcattttgttagactatcttttaacaaagctgtatgcgttgattatcattgacattgtgcctattctactctctctccaacacggagtgccattttaaaaaattgctattttgctaggcaaatatttgttttgaatggttttagtttatgtttctacttactagtgagattgaacgttctgtcatataatttttccattggagtttttttttttttttttaatgtgtatgtgtgagcacaggtttttgcagattcacttgtatgtgggaccagtgtgggaaggtcttgtttatgtgggaggggggaccacagataacaaagaacagccccttgcccccctcattgaaaaccagctgtgcatctagacctctgtcttcccacagtgccgccaagctcctggacaagaacccattctcggtcagtaacccgaaccctctgcttccttcacctgccagtctccagctggctcaactgcaggcccagctcaccctccaccggctgaagctggcacagacagctgtcaccaacaacactgcagccgccacagtcctgaaccaagtcctctccaaagtggccatgtcccagcctctcttcaatcaactgaggcatccgtctgtgatcactggcccccacggccatgctggggttccccaacatgctgcagccatacccagtacccggtttccctctaatgcaattgccttttcaccccccagccagacacgaggccccggaccctccatgaaccttcccaaccagccacccagtgccatggtgatgcatcctttcactggggtaatgcctcagacccctggccagccagcagtcatcttgggcattggcaagactgggcctgctccagctacagcaggattctatgagtatggcaaagccagctctggccagacatatggccctgaaacagatggtcagcctggcttcctgccatcctcggcctcaacctcgggcagtgtgacctatgaagggcactacagccacacagggcaggatggtcaagctgccttttccaaagatttttacggacccaactcccaaggttcacatgtggccagcggatttccagctgagcaggctgggggcctgaaaagtgaggtcgggccactgctgcagggcacaaacagccaatgggagagcccccatggattctcgggccaaagcaagcctgatctcacagcaggtcccatgtggcctccaccccacaaccagccctatgagctgtacgaccccgaggaaccaacctcagacaggacacctccttccttcgggggtcggcttaacaacagcaaacagggttttatcggtgctgggcggagggccaaggaggaccaggcgttgctatctgtgcggcccctgcaggctcatgagctgaacgactttcacggtgtggcccccctccacttgccgcatatctgtagcatctgtgacaagaaggtgtttgatttgaaggtgagttgtccaagacaggctgggagccacagctagaagcctgggcaggcctttccccatgacccaactcacgctgccaatgggcaaggaactgttgcattggggtaacagaattttgccatcagtattcttgactaaaatcacaggtattaggacccataggaatttcagaaatgtatcaggaccagtcccttgcttgaaggtgagtcagaaattcttacacactttttctagatgagaaagctgaggctgagtaggggagcaaaggaccccacctgggttgcagagagaaggggctcaggagtttcctgccttctcgtggagggcttctcccccgtagtatgcctagaatctactgccccttgagtacccatattgtagtgagttagaaaagaaaaaaagcagaattttggatcaggggaaacagattaattcccccttgggacctagacaaattattatagagagcctcagcttccccatcagcaaaatggaggtagagtctcatgacaccttcccggtggttgggaaatgctttgagttcctgcaaacagaggtatatgatagtataatgtccccccaaaaaatgtattgcagatgcagtgaaatattttgaagcaataacaattataacaaataccatatattaaaccctttctgtgtgccagcagtaactcttatgaggtagatattattatgattttcattttacagatgagaaaactgaggcccagagagatgagatgacttactcagccccttctccccgccacctccccagcttgaaagtggcagagtggagattcaaatgtggccctgaccctttcagagcctgcaccatttaaacactgggctgtcctgcctcccatctctcatcctgtccaaaagcataataatgtccttgcagagtgtgagtcacactgcagcatgtcattcacctctgtttgggtcacaccatccaagtgcatccctgtgacccagataggacatgccctctgacctctagtcttgggaggggactagctgacacggggaggtgctcaaggattttgtctctcatgaaccttttctaaggctttgtaagtcactgtgagtctacctgccagattctcccaactggatatgaaataggtggggtcttcctgggggaaaggagaaggggtgggaggtgggaggtaggtggtgggggcaagggtccattgagaggggtagagggaatccaatttgtgagtctgggctcctgttcaagatgggcatgagatgtatggatgaggagctgatggagcaaaggctggatggggaggcaggaacagtgggaggagcctgggagggagagaggaagggtggagggatgtgtctgcaggggtggtccagcctctgggcgctctgtgctccctgcctgaccagtgtctctgtgctcatcctttgccttcccatggactcagttctactttggtcacttttctttccttctgacctaggactgggagctgcatgtgaaagggaagctgcacgctcagaaatgcctggtcttctctgaaaagtaagtgctgttcaggaggacaggctcatgcgtaggctcaacacatattcactgagcatttactgtgtgtcacacgctgttttgagtcctggggcaatagcagagaccagaacaggcaaagttcctgccctcaaggagcttgtgcttcacaggggccagggagatgataaacaaaatgaacaagaaaattacagcatccctggtggtaaatgctaggcagaaaacaccaggcagaggccggaagtgcgtgtgtgcgtgggcgtgtgcctcccttttctggctttcatttttttcattgtagtcaagttcacatagggcttactattttaaatactttgaaaatactttgaagtatacaattcagtggcatttagcacattcacgacattgtgcaaatgttaccactctctagttccggaatattttcattactccaaaaggaaacctcatactcattaagtaatcactccctattccccctaagccagcccctggcaaccaccaatctgccttctgtctctacggatttgcctgttctgtacttttctgtaaatggaatcatatgatatgtggcctttggtgactggctttttcttttttacttagcataacattttcaaggtacatccatccatgttgtaatatgtacaacctttctatgactgaacaatattctattgcatgtatatatcacattcttgtttatccattcatcttttgatggacatttggattgtttccaccttttgactattgtgaatagggctgctaggaaggtttggggacagtttttgtttgaacacctgttttcaactatttgggggtctgcacctacgagtggaatttctgggtcacatgctaattctttgtttaacttattaaggagccggtttccctttctcgccctctccagtgctggcatccggtgtatacttggttcggcagagggaacattgtgtgcttctcccaacagcacagctgtttataaccctgctgggaatgaaggtgagcaaggccctacaggtcagcagcttgaagcagaagtgggctacccacaggcacattatgtcctgtctttaataaccaggacttccctgatgtccccttctcacggatgtagaaagcaaacagatcccaagacactaaaatgcattgggcctgctgtctgggcccatcagtattctctgagatacttgagacgtaaagctttgctgattatcagcatgtccagaggtacaatcatgccaatcactaataatatgtgaaggggaaaggttcagttttctatgcctgcttatgtcctaataatgacttttgatgttacattctgggttttcactgactttgtgtaattcatcatttagattatgcctcaaatcttggaacatcatacgtgcccattccagcaaggtcattcactcagtcaagccccacatttcctttggcttctgtggggacaactgtgagtacggaaacattttctctagaaattaatgaaaatgattattagtttatttatttgtttgtttatttgagacagccaggctggaatgcaatggtgcaatcatatctcactgcagccttgaactaactcctggtcccaagtgatcttcctgcctcggtcaaccaaagtgctggaattacaggtggccaaagtgctaggattacaggtgtgagccaccatgccctgcctcaaatacctctctgtgtgccagtcaccctgaaatgcttgttgctttccccagcactgtgttcttcatgctcagtatgcacctgacatgccacaggctgggaggatgttaacactttttttagtggagagttggctggcttttgaggtctagacccatttatacctggtacccttcaattttccactctgggaattacacttctctagtttccaagatgacatgaccagaagtgaggtgagcatgtgactcaggcagccaaggagatcatcacactttctggccatagattggttcatgaatggtgtatgcctgtagtcgcagctacttgggaggctgaggcaagagaatcacttgaacccgggaggcaaaggttgcagtgagccgagatcgcaccactgcactccagcgcaggtgacagaccgggactctgtctcaaaacaaacaaacaaaaaaaccattttctccattgtcattgttgttgtcaagcgtttgtagtatcacctgctatatctgggcctagaggtgctgacctggctttgtgtcattcagaaaaacaaccccagacagaagtgaagagctgtttaatccagttcatctagtattgaaacacatgacttaagaagcagacataaatccttaaaattcaaggcattcctggactttctagcattcagcgctggcttagaaaaaaaaaagttggagctttttatgtttttttaagactatttaatgttttatggaagtagattatttcctatgagagggtaattttgaagcttgaaccagaaagtgtgtgaaagtaaggactacgcaccagtagcatttgttggccccttgaggaactggtttgtgctgtatgatgtttttgtttgtttttagttttgctgtctctgcaacatacattttcgtcctccaaagctcctaagcttcatctctcctttttcaccaacggtgacagctcctcttctctctggggtttcagttgttttgtgccaccaccctacacccccatctgacctcttcttctcctctgggcaggagaaaggggagtgggaggaaaactgactgtaaaacaaatgcatttgtctgaaccctgctggagggcacctgtttgtgtgccttagcctgtgcctgtgcttttgtggtgtgagttgctgcagcctctttctctcttctcctgcgagtgaacacaagctcacaagagcatgtctccacgtgctgtcccctctacgtgttggcattgcaaagcatcaggccagtaagctgtgaagtgcagctctcaggctctgaggagtgagtaagcggaaaagcgaggtggttcatgatgagacgtgaggcctgcctgagcccaggcttctgtttatttgtgtgtgttgatctgtgatgttgaataggagaagcgcttcgagagagcccctgtctggaagcccacattttggtgaaagagaattttgtggtttccctctctgcactctgctcgctcagagccatgcccaggtcaatggcagcttcgggtcagtcccaggagactgcaatggctagattcagtgaggcctgtcctctgaggtcagattcctggtaacatgaccttgtgtcctgatgggggtgtgggccatggaggcacctctgtgctcacaaccctgccctgagaccccactccaggcactgaaggggaggaactgtgaccacgatgggggaggctggattgagtgtcaggtgggcagggggcagggcttgtaaattgactccaacctggggtctgggtacggggaagagatggcattaactgagcccctccataaaggggggtggatggggagaggagagacacaggcaggacattctgcagtctgtcccaggcctcttccccaccctccagcgctgcccattgagccagagaccctttcctatggacttggctctagggacctaagttcaagtcctactttgggagccacttgctgtgtgtctccaggcaagtcactttacttctctgaggctctgtttccttaagtgggaacaataatgcctttggaagataaagtaaacaactggatttccatccagcttgtgtaatttattgttttgattattcctcgaatctcagaacatcccatgcagctctgcagcccaggcttctggttcagtggccagcgccagacagtgggagcaaggcttgggatagatccagtattgtcctgcccttgtgaggatcagatgagataatatcagggacaatgatttgggaaccgtcaagtacatatgaagtaaccatggctgttcttgagtaacgagcgcttttaacccattttggctgtgaagagtcggggggaaacccatgctgtctaaggctggctctgtctgctggccataggattttgtccgagtcttggtatcagtgttccccttacacaaatctgtctagtaatacccagggtcacacttgctccaccttagagatgttttgaggttcccatggatgtacttttaaattacgtaccagtgggcaagcacaagctatctgatgatttgtgtgttgattctaattaattcctcgaagctctgagtgccacttcctccgaacacctagagatggggagtttatctggcttgagcctggtgagaagcaacgcaggaaacattttgctaggagctaggaggggacagagacctaggggacagctctctgcgaggagctaggaggggacagagagctaacattttgggagctaggaggggacagagagccccagtcattgtaggatgataataaaaacaacagccaacatttatatagtactcaatatgttcttagcatttttgttttgtattagctcatttagtcctctagacaaccccatgaggtggatactattattatccttattgtacagttgggaaactgaggcctagagaagcttagtaccttatatgaggccacatagctggtaaatggaggtggtgggatttgaacctaggcagcctagctctggaagcctcatttgtaaccactaagccctgcagcctctctgcgaggatctgaggggtctcttccttgctgtgatcctcctctttagtaagcccctctcacctccccctctccctaccccacaagccgcttgggaggttctgaggctgcgttgcaggtgacagggacttctctggccttggccacccatggagcaagatgaagaggccagccacacctggtatccacattcttctgcaccctgacagcatctgccaagatgaactcagatgtttggaggccttttctacagacccagtggaaggggagagtcagcatttgtctggttttatcattataacctctgtgacatcttgctggtcacatgagcctcctcaagcctatctgagggacaaggacaaagcctgccccagccaacccctacattgtcagtggcttgatgttcattcacatccttctgtcagacgctggtcccccggtttgccattgccagcatatggaattgaatgcaggtgtatctgtcttgaggaaaacctgaaatgcgagaacattgacatttgaagacaagctgagaaatggagaaatgattaatccactcttgaaaaatactttgcaagtctcctttaagtagcagaagagtccctcagagaaactattgactttctttctgcctacaaacactgacctccaaagatatcaccccaaagataaggggtgattactctgttgccaaaggatatttttccagtttccaatgaatgcccagtgagttgtttttgcatatacatttctaatgtttttctgcttacaaaacttatgcttattgtgaaaatgcaaacagaaaagaaatactgaggggaatgaaattccccggttgtctccctttcagccctcacagagatcccattttcctccacaagtgaggtctggtcctgcgccagcactttgtatgtctgattccatttacatgcatcttttcagaaacacttttttttgagtaaaaccaggaacagccaggatcctgccactgtctgatcatatcactaatgtctgtggagcgaagagcagttactgcctctaaagctccctgtttttaagcaagagaagaccaaagtgacacggagctctggaaatgagccttcagattatatccgaactgccacaaaatctaaaaggaccgcaaagaccatctgccactgccaccaagcccttctggggacagacttggctgcatttaaacttctcccacctgtgttggagtctgagtgtttcgttgccttgtttgtttatttatttttgtttaggttttttttttctcattttcttttcttttcctttttattgttatttatttatttatttatcgagacagggtctcgctgtgtcacccaggctggagtgcagtggcatgatcatggcttactgtaatctccacctcctgggctcaagcgatcctcctaccttagcctccaagtaactgggactacaggcatgtgccaccagactcagctaatttttggagagacagggtgtcgccatgttgcccaggctcgcgtgtttatatttgacagagacgggacactgcactgacagttgtatgctgtgtttgctgttggtagggtgatttgtgtctgtcctcagcccctcccatcccactctagggtccccagagataggtgttcactttcacttaagctcctgccatttgaggccaggcactttctccttggctgactgagtcgtcataaacagagtaatcaggtttctggaaggggccttggggctttctcagcctgttagtagtttttgtgtacctgcccgaggtgcactttctctgtgtctgtccctgtaaagccaccttgcagttttcacaaccatcttggagtttatttagtgccagtgtcacagatgggccaccctgacctgggatgatacacatcgtttttattatttatttctcgccaagaccctgcacattggggaacttgtataaataaggaaatggaggctcaggaaaatagaaatgtctgtggaaggccagaggtgtaagtcacaggctgcaactctgattactggctgtttctggaacaccatctgtctgccctggccctctgaatgcatggcttagagcgctctggtctcctgacttctttgagcatgaggactagtaattgatgtggcatatactaccagccgcctccccaccattccagctctgtcattgctcctgtccctccagcaagggccaccttgtgctttttcaaagagagcaaagaggaggagacaggagacctgggtaggttttgttttggaatttgttctttttacaaatcttactttttcttgttggaaaagcagtgtgaacattgtgtaaacaatcttagcagtaacagaaatataaaagaaaagtcaactttgcagagaaaacagaagttaaatgcttttgttataagtatatatctctctagctagtgtatgtgtacatgtttcattagtaaaagtaattttttgggcacaaaccagataacgtcatacaatctgttacacaatttgtttttttcacttaacataagctttcaatatatatttaaatcgatttctagacatctttccacatcagaacgtaaatagttcctatcttattgtgtaacttcatttttgtatttaccttaatttatcaagtctgcgattgataggttttttttcagtgacacctgagttttaatcacaaatctgccactgtttaattggccacagattaagatccttaacttctctgaggcttcagtgtcctcatatacagcgtggaccagatgacctcccaattttaacgttttgtgactctacagtttccagggatgttgaagctgctaaacaggtgaatcgtccaagatccgtaggcaatcctatggatttaccagtaaaagtaaattcactctgagtcagagctaatatgctctataaaatatttgaaagcatcaataaaggcaactgtgtctaccctccaagttaagccaagatccatagctacggaatttgcaaccatttgctatctgcatgataggttcaaaatcaacatcttgctctctgcataacaggttataaatcaacatcatgagagataaatatttgccatatctgctcttaggcatgtttagaacaaaaccagcagaggcccacagactctgtgccagataacattagatcacatctgagacagatcaggctggagcacagaaatcgtttactgaagatggaatctacactttgcagctctaggaggcagtttgagagacctctctcaccctgcaggcctgttgccctaagccatatttttacggcaactctaagttatttgaacttgagcctcttatttgaactcgggcctcttatttgaactcatctgtgaaggctatttctacctgcaccaaggggcaatgaaaggtcttagaatcttcatatacaagtctgtttgcttcttttgcatttctccccagctacaaaagagttgagggtcagttgagaggtctgggacccagccatatgaacgatcaggagcaccatctggttttaaaggtgcagcccccgcatgtgaaaatgcacagcccaggcccccgatcccatgtgggggcactcaaggtcagtgctggcttgcaggcaggctaaagcctccctgaggctgaaaaaggatgattgtccctttagcttggtaattcaggctttagtcacacccctgcaacttagctctcttagagatgtgacctctgctggaaagttttcagtgcacctgtcttacgtgtggctccttggcactcagcagacagagcccatcaacaccttgacctgcccttctcccctacagtatgtcttttaaaatttatttttggtaacttttaatatatttcaaacttacagaaaagttaccaaaaaggtataaggaactcccatataacttttgtccagattaatttcactactcctttatattttgccccatttgctttgtcattttctctatcttcctctatctgtctatctatctatctatctatctatctatctatctatctatctatctatgtatccatcatttgatcagctgtgcattttcccctaaatcattatttttagagtaggttggtgacattgtacctcttcacttctttttcagcatgaatttcctaagaatacagactttctcttacataatcacaacaatattttttcccaatgcagaatcattgtaacacatcctttaactgttgggtggaggaaggagataaacattatttacaggagcctgcataatgccaggcattgccccaaagcaccgtacattcacggtggcatttcatcttctcagcagtcctgtggaatcaatttttattacccctgttttacagacaagccaacttgggcttggagaaattcagtaactggcccacagttagtcacagagggagcagacacagactcaggtctgtctgattctcccactgccctgaccctggtgcctggtgactataaaacacacacttgacatgagtctgttctcagagaggccccaggcccaggtgtctgtagttcatttgtgtatcctctcaactctttctagccaccgtggcagcagaattattcatggagctgcaggattcataaacaaggtgctcactgcttggagcttatctttagtcctataaagatgagactaccaccaacacagacaaacatgtctgaaagatgaacatgcttgggaatggatgcatggttaaacagccaattacacagagagagaggacaaacattacattcattggaacagggagtgggaaagacatgggtttcctgtttatactgagcacagttggagaaagctatcattatcctggttcttggggtttagcttgtcaaggcatctgggaggagtggaattttagaacttagagccacataagcatatatattttttacatccggaaaggactttagacctataggtcatctccctcgttccagacgtggggaaactaaggctcagaaaaggaaactagtttgtctctgtcatgcacctaatcagcggctgagctggggattgaacccaggccctctgtcttctaggaggatgctctttccactggaaagtcccaagctttttatagctcaagtcgcctttcattatttacttccaccccaagcagccactgtcccgcatcttcatatttggaaagattttatctgccaaagtacttgtattaatgagtaactaactggtgacccatttttattaatcaaagacagagacacaccaattagactttctgattagcctaagagctaaccagtgttaaaagacaaattgtaaatgaattaaatttaacagagtttaatttaattgggcagccctcagaaccggaagaggttcagagagctccgctgcaccacgtgggcaggcagcatttatgggcagaaaactgaagccagatacagaaacagcttgataggttacatctccgtatttgcctaatttgaacatggtctgatcgttggctgcctgtgattaactgaagcttggctgctgtgattggctgagactcagctatttgttagaaaagtacactacttcaggctttcacctaggtgatgtgctaagttaaaatgcagttccttacataagaactcaaagtatggaggcatcctcaggccaaattgaatttaacaccacattaccatattgataaagaaattcaaagtacgatctcaactcgcatttttcaatgtaaagaataatgtttagccccctgcttcctgtggtattattacctttgaagacctttaagggcttataagagagcccgggttgggaattactgcgtagcatggtgacgcttgctcaagagcactcaggattgccggtgcccctgatgtacaaactgtacttttgatgtaccactcagggacctcactccgcctgtttcccttctcactttcctccttcgctccctccctttttccctcatgattcagatctcccacagggcatagggcaaataatagccatgtttatgtaaagtgtaatgagaatagaatagagtgaaaacagctactattctacatcttgtatgaatcatatatggttttgaacctaaatggagttcaacaacaacccaaagatatttcagatcaatggcagaaaagaatttgatgaaccatcctaaataaaatattggcaaaagaatagaacacataaaaattaatttatctttctaactggataggatttaccacatgccctgaagccagacaccacacaaaagcaaactattaacctagagattctcaagattttcatttcatggctcacttagaaaataatctgctgaagtaaatggtttaactgaagaagctactcatgatcactggaggaacttggccttcagcctgagggatcaatatcttggcactcctataaccatttgcagttgatgtagctcataattggaaagctccaaattactattatctggaagaatactaaaaatctcattagtgtcttaataaatgacaacaagggaattggtaaaatccagcatctgtttctgattaaaatcttggaagagaaagaactcagaagatgtctttttaaaatttgactggaaattttaattgagacccattcacttagtgcctttggtaacgacatcttcagcatgaatgcttctcttctttggtgactggcagctgcgaggttgttttttctactacccagcagcagcagttgctgtgctatgttccaataaaagcctcttgagttgtcctttcagtctggaggagacaatgagagaggcactggccctcatgcctgttcactaggcaactggataggccaggagcaggataggcctggaactgccttgggtgtctgctccattgtccaagcacacattagcacaggccaaccacagcaaagtcacatggggcagaaacgtgcctcgctaagagaccaggcagagcacctagcctcagccgtccttgtgataagctcagaggaccagccactctaccctgcttgaaagctcagctgtgtctgcatctttaagtgaacactcacactaatgggaggcaaagattctgcttcttaatagcactcctcctttcgtttctgcagaagggttcagtcctcactagccaggctcagactcaaagtctcctagctgatggagagtccatttgcactttaggaagatgaggagctgctctgggagctgcctgaatccttgctcccctttgggaaagtgcttgacctctggacattgcagagtgggaggtcggaaagaggcacttgggcttcaacaattcagggctgaaccataaaaggaaattcttattgactgtaattgttttcagctcaaatgagacaaatgagggcttttcatggtagaattacccaagtattagcccttgttaggggtgacatcttagactttccccctgtattaccttagcagagtcggccccacatcaaatgtaattagatgtagaagttcagtttaacatagaaaattgtgattatgcaaatggagactatgctattagaatgtgtttcaggttcggaaaattatatccttctcttccacattgggttggcttatggttactaattcttgaccctcccagagattccaggctgattaaggtttgcacaaaacagacagacacacttcctccctccaggagctttgattagggccaaatgttggcttccaaactgtgttccttagaggtgcctttgagactgccaggtgggggtcgtgccagggtgccggaccccaaggtttgaccagaatagctcctcttttatttgttgaatacattgggataaaccagttttgtttgaagaaaggactccaagctaaaaatatttcgaaaaccactgccctaaaccacaggtttttgctgtgaatatcaatgcatatgtattagattcccacaaactttctatgttcttttttctttattggaattgtaagtcaaacaacatgaggtatatatgaagaaggttcagcatgtctcatcttactgccttcccattctgcttctctgaagataaccagcattgacaggttgatatatatgctgcacatctttgtctgtatgtgctgatattctttaagcattttttattgcaaaaatttttaaacatacggaacagtagagaccagtataattaatccttgtatacccatcacccaattccaataattatcaaaattttacaacacttgcttcatctgtcttttttcatatatttttgttttccaaaaatggcattatagtacacataccacttggtaacctgcttttaacttaacaatctgtcttaaaaagtatttcatatcaccaaggtgagagaatcacttgaggtcaggatttcaagactagcctgggcaatacagcaagaccctgtttatacaaaaaataaaaattaaaaaatcagctgggtgtgatggctcaagccatcaatagtcccagctattcgggaggctgagtcgggaggatggcttgagcccaggagttcaaggctgcagtgagctatgattgtgccactgcattctagtctgagtggtacaggaagactctgacttcttaaaaaaaattattctatatcagcacatttacctccttcttgtcatggctatgtagttttcaattttatgattgagccatcctttactcaaacatttccctattgttggacattcaggctgttcccccaattttttgccacctaataaattactgtaataaatgttcttgcacatgagccatcacatattggggtgctattatttctataggatacatttctaagagtggaatggcaggatcatgggctctgtatactttgttttatttaatattgctaaagtatattctcaaaagtttacagatactcaacctcccactagcaacatatggatatgtgcatttcctcatatcctccacagccctcgttgttactgcttataaaaaacattattatgaaatggtggtgcatgcctgtggtcccagctacttgggaggctgagatgggagaatcacttgagtctggaagtcaaggctgcagtaagccgtgtttgcaccactgcgctctagcctgggtgatgggagtgagacccggtctcaaaaatatatatatatataatgaatccttttgtaaagagatagaataaaattgatattttatgtgtgtctgtgaatggattttttctgcattaattttgtaaattatagttttacaatcattgtttaggggaaagatagccattaagaacgtctggaagagaggggaaaagggaaccgtcttctgaataccactaatgatctttgttcccattagtttgcacagcggaaaggggctggccgtgtggtgcacatctgcaatctccctgaaggaagctgcactgagaatgacgtcattaacctggggctgccctttggaaaggtcactaattacatcctcatgaagtcgactaatcaggtaggtctgggtactttcactccagtgtatatgccacagaccacacattagtgaaagggaacgatataatttttgaaagaagccattcttaacataaagaggcgatgccgtagctggccttctgttggcatggcgtaggtgtttttgctggtgatgtttttttgtttcccctagtttcactctaaccttctagtgataggtacaggcctttgtgaattgcctagaggtgagaggagatgctttggaatgaggtgctcattcacatagaaagggtaattggcacccaaaataaaaatctatggacttgaatctcttcactgtgttgtcaacccccctgagctaattataatcttatcctctaagcctctcctatctgatggcctggatttggagccagccaagaacttgggactaggtatttttcctggtccttgatgtcagcaggtgaggccctttgtctcacagcaggagagtaggagtgtgagaatggatggatgcttactaagtctaaggaactaagaatccttaacctgtaggagttgactgagccctttgggatggagtacctttgtcttcatttctaaagtcaggtggggagtttatactcccaacagtcagaaatcagaatattttatcttttaatgaatatttttactttatgaatcggaggaacaggcataggaaaaattcttttcttaaagaaggctgaactttggagactcatagccacatcaggtcattaagctatctctctccatcaacctggagtgagactactcacttgtctctgttcctacttctcagaaattctattttgggtaaatgcacagaattcagcttgtaacattgatgtggtgagagtccctagattagtattattcccatttgacaagtgagagctagaggtgctaaagtgtttatcaagaaaaaggcactgagaaagctgggtggcagaatgtgaaataaaaccctaaagaatcttgacttcttagtcgcccacgctaatgccatagactatgacagcatggagaaaagctgtgcatctgaaattcagaaataaatatgagagaaggaagagaatgagcttgtttagatcatttagtttaaggaaatgagagagtcaggggctcacagtgagggcttccctgtcaccgaccccttttcccctgcagcattgaggaatcaggatcagtatattgtcagtatagtacaaaccaaacaaatccaaaaaacaatagcagcaacaaattcaccacaccaactactggggtaaactgatgcacagtcaaaacggtctctttggaactctcagtagacacaggtttagtggaaaagcccatttgtctgtgttttatcagagcagttaaataaagaagaaagatgctgtggaaacataatcgggaagttttcctttttctttaactcacaacaacatggccttccttcaagcctaggggtttgtgagttcctgaatttttttataaggaaagtagaactcaaataaccaaagcttgtgtctcttgctgtcaccatcaccaccagagagcaagttttatagggatcagctcaaggccacatatgcaactgcccctccagggaaatgtgggttagtgggctcttccatctcagaggtattccatggcatgatgtagcccaggacagacatacataattaataacaatgtctggtaaccctggggatcaggaaagggccatcttataatgagctcttttggtgatgtttataaaaaggtctctttgaacagatgggatcaaagagatctcttccttgtgctgactttttttccttttaagtgaggtataaaacacatactctacagtgcataatgtacactcatcctaagtgtacaattccattaatcggttacatgtgtacacccatataattaacacccaggtaaagatatagagcatttccagaatgtcaggtttccttatgcttcttctccatcagttccccatccccacctgagagagaagctcaatgctaactcctgtcaccgttgattagttttgcctgttcttgaacttcatagacgtggaatcatgccttgtgctgaatcttgtttaagaccattaaagtcaagtccagtgagtgtccttcctttctttcttaggcctttttagagatggcttacacagaagctgcacaggccatggtccagtattatcaagaaaaatctgctgtgatcaatggtgagaagttgctcattcggatgtccaagagatacaaggaattgcagctcaaggtaaagcattatcttgctcattcagtcattcaacaagcaccagatgagtttctcctccgtgttaggcactgacctaaacgctggtggaaaggagaggataggaaaagattcagaaattacacactgcctttgaggatctcgaggcaaaccattgcagcatggcaagaaaagtgctcttgaggtaaatacaaagtgcaaagagacgcctgagactacctgggagccaaggaaagttttccagaagaagatgttcacaggggaacttttaaaggaggaagtcagaagggaaaggtgctgagagttccaggcataaacccttgaatacaaccttctctccctatacagaccttcagtaacattttcttcttctgtcacccccttgatctcttgttctcttctctctccttcatatttacgtcttaagcctcatagaagtccttctaagcagcccttggctgaattggccactgtcagaactcagggatgcattcaaatagttccaaaccagggtttgcttttgttttagctgatctacgtttctttcttttctttccttcttttttgttttattgtgaagtataacagaacacacagaaaaatggctgattatatattgtatggtttaaaaagtaataatgggtgagatctcacaaatcccgtaaaaccaccaccaaagtcaagaaatagaatatggacagcatccagaagctcccgtgagtccctcctcctgttcaacccctccctctctactctcctgacttcaatgataatcatatctgtgcttttccttatagttctatcacctgtatatgcctccctaaacattatggtttagttttgcctgtttttgaactttatataaatggaattatgctgtgttcttacagatcttgcttctttcattcaacatgatgccatccatgttgttgggcatgtctatttattttcattgttatatacatttccattgtatggctatacagtttatccattctactgttgatggacatttgagttgttttagggacaaggctaatctgaaccttctcaaacatgtcatcctggtatatatgcacttgagcatataactagaggtacatacataactaagattgagatagctgcatcataaggcatgcttacctcaactttcctagatgatagcaagctctttccaaaattagttgtctcaaatttatactcctactagtagtgtattagagttttcggccgggcgtggtggctcacccctgtaatcccagcactttgggagaccaaggtgggtggatcacgaggtcaggggttcaagagcagcctggccaacatggtgaaaccccgtctctactaaaaatacaaaaattagccaggcgtggtggcaggcgcctgtaatctcagctactcgggaggctgaggcaggagaatcgctttaacctgggaggcagaggttgcagtgagccaagattgtgccactgcactctagcctgggcaacaaaagtgaaactccgtctcaaaaaaaaaaaaaaagttttcaatggtccacattcttgctaacacattgtcttgtccaacttttaaatttttgcctgtcgtgggagagtatcatggtttatcacagttttgttttgttttgtttttgagacggagtcttgctctgtcaccaggctggagcgcagtggtgcaattttggctcactgcaatctccacctcccaggttcaagcaattctccttccccacctcccgagtagctgggactacaggcacacaccaccatgcctggctactttttttttttttttttttgtattttaatagagacagggtttcgccatattggccaggatggtctcaatatcctgaccttatgatctgcccgcctcagcctcccaaagtgctgggattacaagcgtgaaccaccgtgcctggccagtttatcacagttttatattttattcccctaattgcgcatggagattgagcactttttcatctgtttgttggctgttccatctggatcttctctgatgggctgtttcttttcaggtcatctgcccatgcttttcttttgcattgtgtcttcttattggtttgcaggagttctcttaactggagcacgtagtctatttggatttcttgtaattaatgctgtattagtgtttgaatctaccctcttattttgtgctttctactgttccatttaatagggattttcccgttcactttagctcattccacattgacttagggtccattttgtctaagacccacaggccttaatccaccttcaaggttgaagttagaagacaaaggcttagtggatgtttctggctaggactggcattctgacaagtctccatatgtagatgggcactgtgtcaaccagcttccagagtcctgaatctgctttgcttgcatcattgcctctgaaattcctttactaacagttctccttcaggcagaacctggcttttttttttttttttttcctaataaaagtatattgcttctttcagacaagtaagcatcccaccccattctatatccaaccaaagttcctggtctcctggattcttccctgggggctggaattgaatttctacactaagttcccagtagagctttggtctccaaatgagatgttgtcataagtttctaattaggattaacggcagtaattggcttcttaaattaaagtaccaaagcatagcaataccttcctgagggagatagtttggggtggtgcaaaaaacatgggttaaagaggtcagatggtcgagttttgctttcagcaaatgtgcactgagtgctcaccgtgggtggaactgggccaggtgccatggagggagaagtagcaagctggcgaggagctcagtctggtgggagaaaaagcaaataaacaaagaaccactgacaaccatgtgacctatcctagattggaagatggtgatgtcagcctgggctctaccgcttcctgctttagtgagcttagaaaagttgcttaacctctgtgaacctcagtttacagatcaggaaaggactatactttgagttatttggctttaagtattttttttcatacattatcttttcagtctcgtaatcactgtaccctgtgaagtgtgtagggtgtataatagcagtaattataagagtacaacaataacaataatgtatacctttaattgagtcccggtactctggggcaaagaagtttacatacattatttaatcctgacatcagtcctgttagacaggtattattatctcagttttacagatgaggaatctgaagctaatagaaattcaggaacttgcccaggattgtacttagctactggaagagctatgattaaaacttagtgctgttttggttttgcactaaagctgcattgttatagtgtgttatcatgatctctgttgtctatgtgaaaaaaacctgagaaatcaggtaatttgcttatagtcacccagccaagaagccgcagagatagtattctaacagagcttctcaagcttcagtgtgcatacagatcacttggtgatgttgtgaaaactcactttgattcagcatatctagggtagtgctgttattgcgtatttctaacgaggtcccaggagatgctgctgctggtggtcctcggagaacactttgaatagaaagggcgcagaacacattattttctgatctttagcagggcttttctgctccccaagctgccatattccctcttaaggcattgtgaaggtcgcatggaataacagatgtgaaaacaacttaatgtatgtctcaactacatagtaatgcatgctttatggtccctatgttgatatgaatcagctgccactctgtctgcacgtaacagaaattcatctccattaagcctgttggcttaagcaaaaaaaaaaaaaaaaaaaaaaaaaaagaatttatggatgcatgtaaatgaaacgtccaggagtagatctggctgcaggtgcggctggattcaggacccagagaccctcattaggacttggtttctctccacgctgccttctgctcttttggctttgtttactgggggctccctgggatgggccgtagcagcccaggctctctcctctaggtggcatgatggctacagtgacctcagcagctctttctcccccttccctttccttcaacaagagaaagccagagttttttcctagaagctcccacaaaagtcctgagacttttgagagagagtcgctctgactggactagcttagcacaggtgcacattcctgaattgatctctggccagggctaggccatgctgtgattggctggacctgtgtcatctgctacatcctcagagctgggacagagacccacctagagctctggagcaagatgagggaggaacagctgctatcaggaggagggagagtggctaccgggaaggtagagggcaaacactgtatccatgtgtgtctctgggccaaaggggctgcatatgaggtcccaccagggtttgcagaggtggggagaaattctgattgctctttctcctctaactttatcttttgctcaccaggtaaagtatagggagagaagggagagattttaaggtatttttcatttcctctcttgaatatttcttcatgcacatatcttatctccccatatacttcctgtggcaagggagttcctcagcttatttgaggcagaacctttcacatgatagatgtttaataaatatgcaaaatgaataagaaagagaaaatctgaaggaacaacaaaaagtgagtagccttcttcctgcagacctggacaagatgattggaatatattctgggttgttctatggaaacttcgtcaataagtatggaatcataatctctctgatgcagaagtgaacttggaataatttaaaccagtgtctcccagtcacttcatcagagggtcatcaggggattttttgtggggggagtcctcttgcccagagattctcttcaataggcttcgggtgggaatgagactcccaggtgcttttgagggcagagggtctggtttcagagccattggtcttgccagcctcctcgctacagagagggcttctggccctgggaagcagtcttgtgaatggtccatggtgctctcagttgggaagatgattgagagtcttctctatgtgctgatagttacaaagcaatacaagacatggttctcagttgggaagagttcactctccaactgggagacaaattattcttgtgcaaaattacacaagatttaaacatgagtgcataagtacaggagctaccagaagttccatggcaaaaggcagtgtgactgaggggtgtgaaaaagggaagagattcctaaacaaggccttgaagaaggggagaattagctaaagagagacagagcttccaggcaggagtcgggtgagtgatgatgtcgagcctagaaagcctggtaatgttgaaacagtcagggctgccttgacaggatctggctcagatgagttctgggctcatctagaaggtttcagtgtcttcccaggactcttgaagtgtgtaaaacaggtgtggagttgtcagagggcatgaaactttccagcagctcccttcatgttggccaagcactctgtgacttttacgggtgtagcctgccatgccctgaggcttttggtggatgccagatgggcctcattaacccaccttcactggtggagaaagtgagtttcccatcggcaataagccttgacccagggtgacctagccaggtgcgggcagggctggggctgctcttcctgggttgagattcctagtggtggtgcctccctcttaatatgccagcacttttctaggactgcatggggcttggaatctcacccttgtcttaaaagcagcaagatgtgttaactctgagcactgtagttggtcccttgtggggctgttgagcggaatcattgtcatcacagaatggatgtaaagataacaatgtctgacgtttgcttcaaaataatatagggggtggggaaggagggtggtgagtacagatgtgtattagtccgttctcacactgctttaaagaactgcctgaggccaggccgtggtggctcacgcctgtaatcccagcactttgggaggccgaggtgggcggatcacttgaggtcaggggttcaagagcagcctgaccaacatggtgaaacctaaactaaaaatacaaaaattagccaggtgtggtggcgggcacctgtaatcccagatgcttgggaagctgaggcaggagaatcgcttgaacccagaaggcagaggttgcagtgagccaaggtcgcaccactgcactccagcctgggacacagtgtgagactccgtctcaaaaaaaaaaaaaagaactacctgaaactgggtaatttataaagaaaagagctttaattggctcatggttccacaggctgcataggaaacatggctgtggaggcctcagaaaacttacagtcgtggcagaaggcaaaggggaagcagacatgtctttcatggccagagcaggagttagagtgggagcagggaggtgctacacacttttaaacagccagatctcgtgagaactctgtcacgagagtagtactgggggatggtgctaaaccattaaaaaccacccacatgatccagtcacctcccaccaggccccaccttcaacatctgggattacaattgaacatgagatttgggtggggacacagaaccaaaccatatcaaaatgcaacaagattagtcatcattgttggctgaagatgggtaatggattcttcggggttcagtaaaccattctctctacttttgtgtatgtttgaaattttctacaatgaaaaggtaaccaaaattttatcatagacctactcttttctctcccatttcaatttttctggggtgattacagctttgtttcacctgccttctttatgcctttacccacagaatacagaagctggccaaagaggaaggtggagagaattttcttagggctttccgaagtcaattctcttatttgaaaatctttggctacttctgtccccttttcagatggcagctggcagctggtccagagagcaccaaacaatttgcaattaccacctaaaatagcagaactgatgctctgatcctcaggagggatcacaatacctgtgaccactagccccagcgtgcagtatttgcagattcatattcattctctgcagccacatccttccatctctccagccatgcatcttgggattagtgttagggagcacctgctccatgccaggctctgtgctggtgctggctgtgtgaagattatcagcccaggggccccctcactggggacctgggatccggatagaagtaactccaggaggtatgggctgaaagtgaccccaggaggaggttctgtggttaagaaaataaggggcagaggaatgtttaagccaaggagaggctcttctaagctcactctaactgcacctctttgacccctgggaaactgcatgggccactagaggatgttttcatctgcagtgtctgatcagcccgctctgcccctcactgggggcacccctgaggggaagggcctgggggtgccatctgtgataaccaacgtgcagaagggaccaagagctcgtggaatgcctctggccctgacattggcctgacctgctcctgcccccatgcacctgagccctaccctcatagtcactctgccatgggtaatctgcaaaacctcagccgctccctgccaagaccatcctcctcccacgtcggtctttcctggatctgggctggaaggaataaccaggaggatatgaagttccagaagagcagaagaaaactggaaccttggggactctttttacaacagaaagctccccatccaactcccatggggaattttatgttctgaagaattgccatatacatttatgccagtctgggggcacattctttagcctttgtctattctagcttggcagtgcaagccacagatttgggagggacccggggtgtggcttcccggcgatggcagatctcatgtcatggtcttggtcctgatggttcccaccagctttcccaagctctgctgctcccctggtgcctgtgtgaaggcagtgctgtgacaggtcctttcagggaccagccatcccagctggctttcccttgatgatacagtagccggagttcattgtgtggcccaaggtgggcaggcaggaagaagacctgcttggtgggatccacatcaagtgcagtcagctccaagtgagcctcttcttctaccccaagtgacaaccgaccctggctgaaggaccagtggtctctagccacacggtggggtgggaggagacatcctgggcagcagctttcttcttggccgacaccaacaggcttggcttctatccttgtttggccttggtctgaacaaggtccagtttaagtggctgaggtgctggaggccagtgcaagtcttgggtgatctggtaatttgtaggtggcactttcatgggctttacagagggttgatctctacagctccagtttgacataagggaccatttgccaaagttgtggtgccttttcttgtggacatcctgcccagtgctgagttcctgggccttttcttgaatgggggattggctgacttctaaaacctctgacttattcacaagcacagttgaaggagtcactgccttctctttgactttctttcattttgcatctccatatgacaagaggtgaggtccctccctcacttgaacattttatatctcttttctgtgtcctgacctctctccctgaaactgcaggcagctcctccttcattctcacctttactctgtgtttttcccagcccaaccctctatctcaacaataacagataatcagccacgccactcagagcactcataccatgctaggccagctagatcacatctctggacctgagattcccatctgtcaaatgagatacgtgatgctttttaacatttgtatggctcttattgcatgatttagctgggcgtggtggttcatgcctgtaatccctgcactttgagaggccaaggcaggaggattgcttgagcccgggcgttcaagaccagccctggcaacatagcgagaccttgtcttttataaaacctaaaaaaattagcctggtgtggtggtgagcccctgtagtcccaactactttggaggctgaagtgggagaatcacttgtgcctgggaggttgaggctttcagtgagctgtgattgtaccattgcattccagcctgagtgacagagcaagaccccgtttcttaaaaaaaaaaaaaattgcatgattctttgtaaattacatagaaaaaatcaaggaaaaaaagtcgattaaatttaataaaactcattatcaaaagtttacatagactgagggtttttagtcttggtctttaaaaaaatcagctttattttttgagatataactcacattccataaaattcactctgcttgctacatttttatgtaagggatgaattctgcatagtcttcaggaagatgctcctgttgccttttgtgcttatgaatttctttttaaaaatcatttattatttatttattttggttatcatgtgtccattctgggtttaggaaagggctttggtcgggaatggggggctggggttggtcctgtcctggcatagccaccgtctaatgacctctgggaaggatggagccctggctgcctactattctcagctgtgaagcccgactcccagcttatgccaccctcctcacagatttactttgagcatcagctgatgtctgtgcttgaggtgttgaagggggcacagagcatggaaagcatggaaaggaacttggagttaaaatacctggtgtcaggtcctgattcttttcactatctgtgtgaccttgaagtgttccttaacccaatacaactccaagagtcaccaactgcatggaacacagggtggctggtgaccctggagctgtgcagagcagagaccctgcctcaacctctctggctctaagtttccatagatataaaaagcggaggctgcagtcaatgatcttcaagtctttccaagtttacaatgcatgcctgcctgccttccttccctccctccatccctctgtccttttctttctttcacattttaatttttttttattcgggcagaggtgggtattaacaaatgctgcttgtctccagcacatggatgtgaacaccaggctccttccttccccagctcaatggaccactcagtgttctctgggccacacagccccacccagttcagcattatactcacactcatccgttggattacaccttttgtcttccccacacaaggtattttttcccttttggtggaccaggcaatgaatgacccaggtcagagctgcttccctcaggtgtttgcaaggccatctctgatctgatggtgatctctctgactttgctagaaacccgggaaggccgtggctgccatcatccaggacatccattcccagagggagagggacatgttccgggaagcagacaggtgaggccccaagccccaagtctccaggcaggttctgggcagtgggaacagactcctgtttctcattcttaggggcatttgagtcatgctgtgccctgttcttgcccctaccccatccatctgcttttctgggtcccacttttccatgttccccatgaaaaacaccagtccagttcagacatgctgctccggttaacctcaggaaaatacaaaatgctgagcttcccttcagctcctcaccctttgttggaaaataatataggaaaaggtctgttaatatttggccctttggggcaagtctacaccctattaaaacagcctaaaagtaatgcgtgtgtgtgtgtgtgtgtgtgcgtgtgtgcgtgtgtgtgtgcatgtgtgtgcgtgtgtgtgtgtgtgtacgtgtggcttcgtttagaaccagctcttggttttcataagttgaatgtagatgtaggaagtaaaatgtagatggttaaaaaaaatcagttatttgaacagtcactttctcgaaacattgaatatattcagttttccaacccatttcttccaaccgaagtttgtgatcaggccaagctggggctataagttgaccactgtcactcccctacaaagacagttcctgaagagaaccaaggtagaaaactgcaggagcaggcacctggctggcacgtcctggggttcttgctggggtggccacagtcggtgctgtcacttccctgtagagggcacaagcccagggtgtttcccccatgatggtcaaggcagcctggtcctagcaagatgcaccttggtgtcccctggtcagtgagggctacgtggttttcctgtgtttgggaacttaatgaaaaaatgcccatccttttagaatatcggatatatgactcagttgacctgcttaataaccaaacagccttcagagtgtatctgtatatatgtgcgtatatctttgtacgtaactgttcaggctgggaatctttatttgtttattagtctgtctgtttttttaaaaaaattctgattatttgggttttttaaagacgtgtaaagccacatcttgccacctgcaattctgcggcagagtggaggggggttaggaagtcttgttctgaaccttacacaggttggggtccttgtctgggtttcagtttcttcatctcagacgtgtagatcaggattctagagtatcttccaaccctaaaatgccttcctaattcttttttttaacctctgagcgtgccctccccaatagttagcatcccttttccatgcataaattgagctgagaaataaatgagaaaactggaggctaagaggttggcttcattctgatacagcccaaatgtaggagtggcttcaagtcttgtagctaagaggccggctaatggcacccagggttaggcagccttacccactaggctggactagggcaatcttgccccccagcgcccaccccgcacacccccaggaggagagtcagaggtccgctccctgagcatagctcccttccaagagaaggcaagctggaaccgagccaaatcagcccagttcttcttcctagttcccaggagcagaatgagtaaaggcacagcgagtggccagtgctgtgcttaggagaagtcctctgcacggaagccagaagggaggaaaaggctttctcctgaaccactctgtgtggttctgtagagttgggagttaagagtgtacacagttacatgcacagtatatctaagacagagactgtgtgtctgtgtgtgggtggggtgggatgggaggtgtgaagattctaaatcctgctccttggctccctcacagatatggcccagaaaggccgcggtctcgtagtccggtgagccggtcactctccccgaggtcccacactcccagcttcacctcctgcagctcttcccacagccctccgggcccctcccgggctgactggggcaatggccgggactcctgggagcactctccctatgccaggagggaggaagagcgagacccggctccctggagggacaacggagatgacaagagggacaggatggacccctgggcacatgatcgcaaacaccacccccggcaactggacaaggctgagttggacgagcgaccagaaggagggaggccccaccgggagaagtacccgagatctgggtctcccaacctgccccactctgtgtccagctacaaaagccgtgaagacggctactaccggaaagagcccaaagccaagtgggacaagtatctgaagcagcagcaggatgcccccgggaggtccaggaggaaagacgaggccaggctgcgggaaagcagacacccccatccggatgactcaggcaaggaagatgggctggggccaaaggtcactagggcccctgagggcgccaaggccaagcagaatgagaaaaataaaaccaagagaactgatagagaccaagaaggagctgatgatagaaaagaaaacacaatggcagagaatgaggtaatgatcaatttcttccccaggtaaggcgaggcaggccctgaaggagaataatcataataatataatgaggatgaacgtttattgaatgaatgaacatttactggctatttactatgcgctaggcactgtgcaagacactttatctcaatgaactcatttaatcctcacaggttttgagtaccaacctttgagcttggtactattgttactgcaggtgaggagactgaggcacagagaacttacgttatttgtccaagaacacacggtcaggaaatggcagacccagaattataccaaggagatctggccccaaatcccatggcacctgttgcctttactagaagttagggtgggacatcatggaaaggcctgtagtcctgttcgtccagtagggagtggcctgaggtgtttgcacccaaagagcctcccaagggagattagatctttggttcattctgtcctccctcctgccagaagcatttaccagtcctggaactctgaggagaagtggtgaaggagaagccgtcaccacctgctaaattaaactgggtgcccagagctgtccacagtgttttacctccactctaataaaaatgcacggtggctgggcacagtggctcatgcctgtaatcctagcactttgggaggccgaggcaggcagatcacctgaggtcaggagttcgagaccagcctggccaatatggtgaaaccctgtctctactaaaaatacaaaaattagccaggcaaggtggtgcacccctgtagtcccagctactcaggaggctgaggcaggagaatcactttaacccggaaggcggaggttgcagtgagccgagatcatgtctttgcactccagcctggatgacaagagcgaaactctatttcaaaaaaaaaaaaaaaaaaaaaaatgcatggcaatggctggcaccttcatggcatctgaaaggtctgagggcttgcagcagtacttcagttcacacaggggcgtcacaaggagggttgtggttaccaggtttatattctaacttggcttacacttccttcttgccagagccttctatatttaagtaggggtaggataagtgaggtttggcaatatgcataaggagcctaatttttaaaatcctccacacataccttctagtcattctgacctgggagttggtgacaatactaagtgcaaataaggaaaccaaatctctactccatgaacactgaagagtcaccttttggatgctacttcagcattcattccaacatgtatagatggagtgccactttgccaggtgatgtgctaggtgcaggcgagccaaaggtgaataggacatagtccatgttacagcagagactgaagtccagtggtggaaacagacctattaatataaaaataatttgtatacaatgggactcatgccagcatttacagcggatgagctgctctgtgggcaattattaactctgcacaggaacgggaaaatagctgctcagagagggtgatatttgagctgagtattaaaagtagaaaaaagcagtttgggttttgttttgtttttttttttgagacagagtctcactctgttgcccacccaggctggagtgcagtggtgtgatctcagctcacggcaacctctgcctcctaggttcaagcaattctcctgcctcagcctccttagtatttgggattacaggagtgcgccaccacgcccggctaatttttatatttttagtagagacagggtttcaccatgttggtcaggctggtctcgaactgctgacctcgtgatcctcctgccttggcctcccaaagtgctgggattacaggcgtgagccgccgtgccctgccaagattcttgatagaagcagaagccagggcaaaagtgaaaaagaaagactgttttgaagaacctggagataatcggcatggctgcatctttagggcatattagggataatgtttttaaagagtaaaatcatgactctgatgcacatatataatgaatacatgtcaaaggttttattcaactcattaattaatgacggcatcatgagatgcaaaaaccaactcaaaagagaatccaaagagcaggcaacatatacaggcaatcaggaatgctaaaatgaatttgctaataggtgtaaaagtggccccttccacagggggcagggaatcggttgcatctccagcagagacaattcatgtgcatctctaggaacaagaatcatttgtattaggatctgatttctgcaacttatacagttgtaaaatacctcagttcaagataatgaaaggtgcagacttctatagaatcagatgccctgaaaggatgtgctagacaaatgcccagcgttccagtgaaaggacacccagtagtctttttttgcccattacaaagtctgccacgatttttcctaactggcatagcaggaggaagaacaggagatgagattagggaagagggtgagactcatggaagacactgtgtgcctcaccaaggacttgaactggatcccaaggacctggtgaaccagtggatattttaaaaagtgtatgtgcttggaggtgtccaagttgctggtgatggatgatgggcagagagcaagagttggcaggggctcaaggaaagcctgggcttcatgtggataccaccagcctgccaaccctctctcccccaaggctgagaggtggagctgcttcctgcacttctactcacactcctgagactctgccctgggaacctcatttcttctactgttttaccaccctgctctcatcggtttgtataacattgctcatttaaggtgacactatgtgtcagccaaagagcccctgatggaaaaagaatctcagaaagccccaagaatttccccacagttctgtccctcaagttggttctgcctcttacaaccctggagtggggtcagtagggacttactggggcccctcacagattgtgtctttaggtttggagccaggcagtccaacagtgtgtgttggaatgactgcagaacagagagtattttgcactgtcctcaaactctgtatgatgaactcaagaaaagcccagaccccacagggctgcccctggagtcagataacaggtggcaactgaacttgggaatgaaggcagcagggcttgctgttcttccagtgcaccaggcacctcctgccctcagcgcctttacaggtgttgctgctgccgaggagccacaagtcttcctggcttgctcctcacctccttcgtctttactcatggccacattctctactgtccctggccactgcacatgatttcaacaccccaacctgctcttctccctcccaccactgcaaaccatctcaacaccccacccaaccccctcacctcccccgacactactgcagaccatctcaacaccccaacccattcctctccctccccaccactgcataccatctcaacaccccaacccactcttctccctccccgccactgcagaccatctcaacaccccaacctgctcccctccctctcgtcactgcagaccatctcaataccccaacccattcctctccctcgcaccgctgcagaccacctcaacacctcaaccccctcctctccctccctgctttcctgtttttggtggcatttaccaccttcaaacctatcacttaatgtctttattttacttagtgtctattgtcacccccagctccaggtgtaaacttcacaaggcaggaagttttgtctgttgtgttcactgctgtgttcccagtccctagaggagggcttggcacagagcaggtgtccagtgagtacctgttgaaggtatgaaggttggaacccagactctggaagcaaaggcctggcttctgagaaccaggtcagaccctgctttcttctgcctcacttttcttgtttgtaaaatggatgtgatcacaaggctgttgtagtactgtaaagaggtcatgctcattaaaatatcctgagctctctggagaaagtttctgtggttgagaagccagtgtgcgtgctgctccgtggtgatgggtggccacgtccatacctgagacccaatcctggccacaggaccataaagaggaggaaagaaatgaagtcacagataaggaaaacatggggaagaaacactgctacatcctactgggagggagggttcgagagtggcaggcccaggtgactagggaagggaagccaggctaatgacaagtggagccaggccagcatgatgggaccatggctgactgagaaagtggtgccatctgtggggccggagctactgctcagctccattctacagctgccatgcaggaacgcatgccacgctgtcaaatctcccttttcttagagcaagacaagtgtctagtataaaccaaaacatacctgtgggccagatgccatctagaagccccagagtgtaacccctggtataaccaatccataagaggtgaagatttttaaaacccttatgcttcagagcctagacaagacccaaccatgcgggaagacaggtgagaacttgttattcgccccacccccttctaccaatttcattcttttattgaccaatatttgtggagcacccggcattgggactatagttagtgacactgaaatgacccctgggctcgtggagctcatagtctagtgagagaaatgctaatccagtgatttcttaaatgaacagaagagcttgagtattaagtgctaagaaggagatgaaggtacgcaatgctgtgagtgcctgtgataaatctgagccttctcagggttaggctgtgcctattgagatttggaggcacggtgagtattgactgggtgaaaaggaagtgaaaagacagaggaagcagcatgcacaagggcctccagcagctccagggctccagcgttgccgtagcagagagctggcattagagtaacaggaggtgaggctgacttgtcaacagggcctacactatgcagggccttgtaggcaggttgaagatttttgcctttatcttaactaccaggggaagcaaatgaagtatttaagcaagaaaatacagtgaagaggctggacacagtggctcacgcctgtaattccagcactttgggaggctgaggcaggcagatcgcttgaggtcaggagttcgagaccagcctggccaacatggtgaaaccctgtctctactaaaaatacaaaaaaaaaaaaaaaattagccaggtgtggtggcaggcacctgtaatcccagttacttgggaggctgaggcagcagaattgcttgaacccaggaggcggagattgcggtgagccgagatcatgccattgcactccagcctgggcaacaagagcaaaactccatctcaaaaaaaaaaaaaaaaccaaaacgacaatatggtgaggatgtgatcatttttgcattttggaatgatcattcttgattgccttgggaagaatagattttgggggaaggtacagagcagaagtgggagaccagtttcgaagtggttcggtagcccgggccctgtggtggcagagccctgcttgcaacagttggcgtttcagtctcagtctgtgagctgctgtgggcagctgggggcacccgttgcacccatctgttccacttaagctgctgctctctcctggaagtgatcccacagcaaagggaagctctgaaaggttgtttcctttgcctgcagggtggaagagcaggggtctgcttggtggagggctttcagcccggctagcaagactgtccctgcctctcccaactcgaactgaagggggtccctttactgtgttgatctgggagtgtggctgcaggaactgcttgggaagggtaaggattattcattttgacaagagagggccatggataggtgattcagggagataaaaataaagtcacctgttggtagaagctataatagctaaaaaggtatttgtagttgctttatactcaggctagtgcagtagacttcagcaaagctttcagtggaatcttccacagcaaacactggaaacaaaggactttaggatttgaaccatgtatccctgtccagtaataactggtgaaaccagtcagccctgagcttctgctccagctggctcctagtcagctcaagggggtgtgtctgattgtaagaaatcagaactagagtggtttacttagaaccaacctcagccaagaatgtcctagaactgcagcttggccctcagaaagcccaggagtagtcattgatttggtggccaaagtttaagtcatgggagaatatcccccagaaacttctaatgtgggggttggcaaagttttctaggactagatagtaaatattttagcctatgtgggccaaggggcaaaattgaggattttatgtaggcacttctataatcacttaaaatgtaattatgtaaacgtgtaaaattcattcttagctcacaagctatacaaaaacaggctgtaggtcagattcggcctgcagactatagtttgttgacccttgtcttaaaggttgggtagaggccctaattctcaaaccaaacacctgctttcaattgttcagtttcacagacatgcgcactactgtgagggtcctgatttgggggaagggaatacaaggaaggaggaaagggagtgttagtttgggctatcactcaaggacagagggcaacagaaaggtgtgagggcactctgactgtgccctttctacctataagtgtcctgaatgatttttttcatagccaagatgactctgttggggaaatgtcaccgtgatggttaaccctggggtcttggccggcccaagtcagttcaagttttgttgcttctactctgcaaaaaatacccagtttgccaggtatttctgccccctaaagacatcgggccaggcttcaagacatttctctgcctccatttgtctgtgtgactgtgagcaaattacttaacctctctgaacctcagttttctaatctataaaacgaagatgctgatagcagctgcctccaagggattctgggaggataaaggaaatgctgtatgtgaaacctatctgagagctgggacctgcattcaatatcattctttttttcttctccctgtcactgctcactgttgatttggtttgctctgttcttcctttgataaggctggaaaagaggaacaggagggcatggaagaaagccctcaatcagtgggcagacaggagaaagaagcagagttctctgatccggaaaacacaaggacaaagaaggtaaagtttgtttcagattctgcacttctgccatgagggactgagtcacaggagtcccccttttgcctggtgatgtcctgctggatggaatatggctgagaccccaccattagttccatgaatgaaccagtcctcctagcgctactttggaggagtggctgtgcctggaatcttcggacagtttttattgaagcgatctttacccacatgtctgggctctgctcactctccagcaatttggctgtgttcctacgagaaaacatgtgcccaaaaaaagactcaggcttcagagccaggctcccaaaatagacaagtcccttggcggggatggggcgagaagctgctttgggcactcaagctggggccctgacttcagcaggcccagaccctaggattaacaagccatctactgtgcttgtatagattgttttacttaattaaaatgaaaaaatccagttacagttctcctgggctggagctgccacaacaaaaagaaatatccttggaacagggccatcttcgtgcctttccggtcaggagaggcaggagaaatgagtatcgctggcagggaagctgatctcctaaatctgtctgtggagttgggagtccatgggctgctgcagatgccaaggggaaagttctagaaggggcctagtagaagctttggctgtgggagtgtatgtacccctgctgggagagggtgcttggggggaattttgtgaggggctttgctgcagttacatttagtgatgacccagatgcaagaaagatgctccagtaagtatttagagtttataacttcattattcatgcattcaaaaactgtatattgagcacccattatctactggggcttgaaattctttgcgtcactttaaatatggtggattaagcattaagggcctattccaaactttgagcatcaccctaaagatgagttggtgccgtgggacttgagtggttcacagtaattgtaccaggtagaggtaagaatgctcagattcttcctgatttgagtggtccttatggccaagtcttgtgccttccagttgaatgctctcaaccaccctctgacctccattctgcatttttgtacaggaacaagattgggagagtgaaagtgaggcagagggggagagctggtatcccactaacatggaggagctggtgacagtggacgaggttggggaagaagaagattttatcgtggaaccagacatcccagagctggaagaaattgtgcccattgaccagaaagacaaaatttgcccagaaacatgtctgtgtgtgacaaccaccttagacttagacctggcccaggatttccccaaggaaggagtcaaggccgtagggaatggggctgcagaaatcagcctcaagtcacccagagaactgccctctgcttccacaagctgtcccagtgacatggacgtggaaatgcctggcctaaatctggatgctgagcggaagccagctgaaagtgagacaggcctctccctggaggattcagattgctacgagaaggaggcaaagggagtggagagctcagatgttcatccagcccctacagtccagcaaatgtcttcccctaagccagcagaggagagggcccggcagccaagcccatttgtggatgattgcaagaccagggggacccccgaagatggggcttgtgaaggcagccccctggaggagaaagccagcccccccatcgaaactgacctccaaaaccaagcttgccaagaagtgttgaccccgggtaactatctcccctttcctcacgggtggtcgggttgattggactcctgctcacctgataaagtatgagcatgtgcaggctggaatgaacataagtaaggtttcaactagcattaaagtgggtgcagaaagtgatttagcaacaaaggcaagcctctaaaagcctggctaaactgttagtgattttaggcaagtggtgtaaaggaagttagataggaggctgcatgttttctgagaagcaaactcagggcagacttctctgcatttacaggagcccagatggacttggataactaaaattagactgggttatcagcaaaaggagatcaggaggagcctcgtgcctgcacagcagagggccacccaggctgttatttctgtgatgggggcaagagtaggggatacaagaaaggagtggaaggggaaggaacagaggatccttaaagggtacagctgttccccttcttactacctcagacccattttttgctagggtctgacagtgatacaagacttgtttcaggatattctctcactccattggaggtgacgttttgtgcctatgcccggcactgtgacatcatgaaagagagagtttaaaataggctaagccccgtcttctctgccaagtggaacttaagatccatcagggggtttggggggagggagagagagtagcctttaagattctcactgtgaaaataattagggatttgctttacagaaagcctgtagcacaccagaggttgaagtgagagtcaggggcagaaaatacagaggaaaggcttaaaaatgaacatttcaacccagggccctgtgggtggcatgagctgttaggtaactgggaggcttgggattttttccatgtcaagctgacctgagctgttttttacctgcacggatctgagtttccatggaaaccccgccgtgaaatgccttcttgttgctagagaaaccgtgaggcccaggctctgtctagagaaggcaagaataaaggaggagtgaaatcttcacctcactccaatcaagccccttttattttgcggtataggtctcaacatgtgccagtgttagaggctcattaactgacccagtgtttggggttcatatttaataacagcttgacaagcttggggagagaatggcattgcctgttttgctagcctcggtggacgtcagcacaatttttgcccgtcagtaattcctctgcctgcagagatggaatgatactgagatgggaggcatggggggtggggggtggatcttctcaactgaaggcatcagcagcccatccccctgggccaaatgcaaacatttgccaagttttattgtgtgtggcattcttttggcagtggaaaaagctcctaatgacagtgctttggttctaattagcaaccattgccccagccttatgtgattaagcagtccaaggaacaattcccaatcatactatgcaggcatagaatttcagggactctttgaggcatgttgtatttctttttttttttttttttttttttttttgccttggttcatgttttgcagaaaactccaggtacgtggaaatgaaatctctggaggtgaggtcaccagagtacactgaagtggaactgaaacagcccctttctttgccctcttgggaaccagaggatgtgttcagtgaacttagcattcctctaggtaagcaaaacacacagtctttcctgaaattcaggtctaggaaataacagttccatagcaacctcaagagcttgagagagctttttggcattttgttgttgacatcgttttttgttcttttgagacaaggtctcactctgtcacccaggctgcagtgcagtggcatgatctcagctcactgcagcctcaaattcctgggctcaagtgatcctcccacctcagcctcctgagaaacttggacaacaggtacacaccaccaggcccggctaatttttttaattttttttttttttgcagagatggggtctccatatgtggcccaggctggtcttcacctcctgggcttaagtgatcctcctgcctcagcttcccaaagtgctgggactacaggtgtgagccacttcacctggccggcctatcgttattttaagtgtatgatgcaataacctagatttgcaaggggcggctgtaaactttcttgcaatttcagtctcccgtaatagaccagatactccgtgaaaacagccttgaataacagtgccctgggacccagaactaagaagtcctgtttttcctgtcagggaatgctttattcttgatgacatggagtctttaagcctagcctttattcaggcaggaaagcagatgcccagcagcctccataaagtcaacaaaaatgaacttcgtctgctattgttcattgctccagtccttcccagaacaatgctacatatttttttctctttaaaggaccaacttttctgaggcaatgatgctgaatagaatgtgtttggggcagactacccctagttcatagaaagggtattgaacagggagacctgggtttctgttcttcctacttatgggtgactgtgtgccctcaggtaagtcataccccttcttgagccttagtttcctctctgtaatttagacagcgattttttcaatggtggaagtgttgggaatgaagtggggagggagtttactgatggaatcacctaggaatgaatcccttttcaaagagaagagttaagcagagtctcagggtagggagtgaaggcactttaagaaagttccctgggagattctgacacaaccactaacccagcaactccagcctacatcatctttgagtcccctcgcattagctctgaaaggtcggaattagataaagtagtagtagcagctgctcagaaggagagctcaggaaagtgtcacctgggaaagtgtcacaaggaagcataaaaagcacgggtcatctgatgcctgatgaccacgtgtctgatcatgcagggaggggctggtcagtgtggaggctcgtcctttccatccaacttgctctttttttcccttctcctttaaaaaaatctcttactatttctttcctccaggtgtaccatttttatagtcagatctggagagcaaacttccttttttttttaagggataaatttgctgcacagcatctcccaagacaaaaacataagaaagaaggaaaaagaaatactaactttagaataaactgagatgaccctgggtattttagctctagaaaacagttgcaaaggccaccctgcaggagaagagagggctccttcatgcattcagtcagtcagcaaatacttactggataacatggtactgtgctagacactctggggtaaccaagaaatataacgcaagtctcttgtcatccaagaacttggaacctaattgatactagcaaaaattaagaataaattctgctaccttgtaatttgtgttttactactgtttttcattatagaaagtgtgaaagattattgtaacaaattcaaaaaataagaaccatatcaagtcaatattaaaggtctgattgatctcttccctccagtctctccccagtctccagaggtagcctaccactgtcatgcccagtttttctctcacaaaaatgggatcacactacacacataatgttctgcaagttcacttagtagcaggtcttagacatttcttcatgtcagtacatagagaacacattctttttaaccactgcaaatattccatcgtaaaagctatgctataaatgactgatctttcctctgctggtgaacagttaggctgtctgctctttttcccattttaatagctaagcttttattgttaacattccccatgcaggcaccatccctagggatctgtatgtattatcacatttaaccctctcaaaacacctatgaggtaggtgctgtttttatccttatttaacagataaaaaatctgaaatgcagagtcacacagctaataactggcaaaaaccagagtcaggttcaaatcccagtcatctgactctagagccatgttcttagcttctgttctctgctgcctttcagatgtgcttgttcagtggtatgtgtatgccagtgttcctgtgggagagcgtcctagccagggggttgtagggtggtatgtatttgcattttaaattttcataattgctactaaattgcactccaaaaagatggtatcagttttccctgcgaccttgagtgagagttcccaatatccacctcccattggattttatcagtttttaatctttcctaaccagttaggaagaaaatagtatctcacctttttaaaattggctctattgagttataatggatataaagtaagtgcatatcaagtgcatagtttgatcagttttgacctataaatatacctgtgagaccatcaccacaatcaagactgggaacaatgttcatcatatcccaaatttcctgtctcctatgtaacccctccctccccacagtgcaacccccaggtaaaggatctcctttctgtcactaaatattagtttgcattttctagagttttatataaagggaatcatattgtatgtgctagtttggcttcttttgctcaacatcattgagattcatctgtactgttgggtggatcagtagtctgtttcattcttcttcttttttttttttttttgagacaaagtttttctctcgttacccaggcgggagtacagtggcatgatcttggctcactgcaacctccacctcctgggttcaagtgattctcctgcctcagcctccggagtagctgggattacaggcacctgccaccacgcctggctagtttttggtctttttttagtagagataaggttccaccatgttggccttgaactgttggggtcttgaactcctgacctcaggtgatccacctgcctcagcctcccaaagtgctaggattacaggtgtgagccaccgtgcccggccagtctgtttctttttattgttgaggagtattgcgttgcatatatggatacatcacattctgtttatttattcatctgttgacaaatatttgggttgttttcagttcggggcctttacagattgtatttgttaatagtcttcagttagctttgagattcattatctcattggtccccgaaggaagagtatggtatgaggttctgcatttgacaggtgaggaaactgaagtccagagacttacccaggatgacatagcaaacgcaggttagaactcaggatttctcagcctgggcaacatagggagaccctgtctctgcaaaaaaataaaataaaataaaactagccaggagttgtggtgtaaatctgcagtcccagctacttgggaggctgagggaggaggattgcttgaacctgggaggagatccaggctgcagtgagccattattgtgccactgcactccagcctgggcagcagagtgagtgagaccctgtctcagaaaaaaaggaaaagaaacaaaaaaaaaaactcaggatttccgatctcagatcactctgttctccaggttcttccagttcaggcagcaacacagtgtaggaaaggctacatttgtgcagaaactatgaacacagtctgtggaatctgattccctgagtttaaatcccctgtctactacctactggctggatgacaaagagcaacttatttaacctctgcttggatttcttcatctgtgaatcagccatagtaataggaggctactacgcagagttatttcgaggattaagtgaacaaatactggtaaggtcttagtggcttccagtgggaggtacttaataagggttgtctattattattattcactcatgaaatatttaagacctattatggctcctctcaccggggctgcataaccctttagcctgcaggactggtcactactggcatggagacttctagggaggtgagagacaattttttggctttgtcccatggaaagcatagagctgaaataagggatgtcaaggactgggctcccagatgggaggaaagggaggccagtcgcgttgctcggggactgggggtgggcatggctggggaagtacactgcactctgcacttgagatccaggccagttctgcatgaccctggccagcgcgagcctgccaaggcttgctctcagtagaaacaaacagcatcgcctgcaaagtgcaagctccctcctctatccatcccagctttactaggatgacagagttataattacccgtgccatgagctgttattagaagccaaatgcagctttagtgatcctagtagaggctgaaaaatggaggactgagtggctccagaacacatcagggccggggcaatatgtcttgatgctgcctcttcatgtccccgtcacattccagaagtgtcctgagttgtgccatgggatatgtggtgtctgcagcaacccccatttattctgggacaagttaccagctcttggggtttctcctcccccaggcttctctccccctagtgctgcctggtagctgcctggtactgcctgaacttgcagagcaggggccagggaagaaagttgccaccaaactgtggagccgggttccccaggtggccttggggagaggttggggttcaagtgagaaagccaacatttaggcagttattaacagcttctgtgatgaaatatttaacacgtgtctccaaaccagtatttttgagcaacaggcaaaatgataggtgattcccctaaacatcacttacagcactattattcctatttcacagatgaggaaactaatctcagagagggtaaacagtgtgcctgaggtcacacagcataagtaaaagagttgggtttgcctctacattctattttctctccatgacactgtggcttccaaggtttttttttgtttgtttgctttttgttttttgtttgtttgtttgtttttttgacagtagaagtctttgttcaagtgaaatcggttccagaactgacagaagatagctctagctacactgctgggggctttggctaccagctcaatccctgcttcagggtctgtggtagctcctagggcatctgtaccccttctggggatcccaggacagggactcagaggactcaacagggggcttaataaaaaccccagggcttctttcctggtaccacccagctggttcatcctccagaggctgggacgggactgagagtgtggctctgatcaaagctctccttttttcccagctgcccctctcctatactgcgggggtctcggctccctgcagagcagcagcagagggaaaactattttgtaacaacgcaggaaggaggcagaccttgctgaatgcgcctctgccagcaccaacagccaggagccaggacctgtttgtgaggtggaggggagaactggcccccacagcccaagctggggccacttttccatcctttgcagagaggaagggaaggacactcaacctccctccgggcacctgggcctgagtgaggccctctcacttctggggaccactgctgagggcatggcgtgtagcctgcaatgtggcagttagagaaagccagactgaggaggacgcctcaggccccggaccacagccccactgtcagtccaggcaggcctcctgggctccctccttccctcccatctccctccctcagagctgcccttcacactgataagtggctattttgaaatgaaaaaaaagttctaatgacaagtctaggctgcttccttctgacagggtctcctaggcacttagctcagtgtcctgggaggtgggaggaggaaagtgaagccacccaaccagctgggcttgcagtcggtcacgctgtgccttggagcaggcgctgtcatgagtggagaccttgcctgtccccatccctgcaagaaattgctgttcccctgcctgtgccattcccaggccccttccttccttctacccaggatggccagacctgaaaccattgcccagccccagcagaagagaggcttgccccgcagcctgcaagtgggattgggtgttccaagcatcacccctctttcttagttccctgatgggtcctgcttctcacagccctcacaccctgccctttggctggcgctgcacagtcaggtgcctggtaaacagggcatgtgttcctacctccattctcaggtgaggaaactgagccccaggagcagttcggctgactctccccgggtcacatgggttcttagcatctggcctggaccctctcagagctgggctctttccactccactgactgaccgtgtcttcaaaaggagaactgtgacctgcaaaacaccttcgtggaggctggagcagccaccatcccttcaaggatgactcccctggctgtgacattgtcactcctctctggcggtggtgccagttgtttcctttgcttggaatcaaaaggcctcccagaattctgggacttatatttaataaatcacaaatgaaatgctaattgatggttcggatgtaaagactagaggaagtgggaaaatgttaatgatatacaatttcacgaaaaaaagaggacagagaattgtaattagggtatgactaaaatggcccccccaaaagaggcctacatataggttaattatgtggaagaaaatatttggattggagtgactctgggtgattttttccttccttttatttacttttttttctgtaaagaacataattctaaaataaacaaacaaaaacgagagaattcttcgagagtcccggtcacagcagctgcagagagaggtacagtgtgaagaaatgaaatccaacaagtgaaatatcagaaatgtcagaaatcaccttcattgttcttggaaggaggctgatagtaggagaacaggccagcggcaggccatggaatggctaagtgcttaccacaccgccgagtccatcccttacattcacaacaacctgtgaatgaagtgggtgtgagtctctttgtgactgttctgcaagtgaggaaactgaggcttggagaagctcagtaaccagccaaggtcaacagcaagtgaggggtggagctcgtggctcccatttctacctgatggctgccaggacacaggggcctgcctcccatgccatcctaaccctgcgtgtctatcccccatcgtttcccaggggtggagttcgtggttcccaggactggcttttattgcaagctgtgtgggctgttctacacgagcgaggagacagcaaagatgagccactgccgcagcgctgtccactacaggaacttacaggtaaaaatccactctccttgcccagcatgccaggggctccccagtctccataaccgagccaggtgtctggcgtccttggccttgcttgcctctgagtctagctcctacctgcaaggcctactccaggccacaggttacttgccattccccaagcacaccaggctgttttctgcttctgtgtctgtctccttccactacatggaaaacccctaatcttcccatagacttgattccatcaggctgctctcgacatggtggctacctcctgtgttgctcctagcacatgtctctactttaatacctaaaacatcctgtttgggttggctttggcaatatccacctctccctctatactgtgagtaactcaagttaggccagtgttcctctggcctgtgattgggactgaccccttcccacaagactcggatgttctagtttttctctgtttctgttcccctatgcaggtatccctgcttgctagaataaaaaaaaaaaaaaaaaaaaaaaaacactgctttgttctttttaactgttcatccatacagcaaatacttatcacaggcatgctaggtaccagacactattctagggaccagggatactggaacaacaacagtaaagtggacaaaaatccctgttctcatggatttttcattctaatgtaggtgacaagcaataaatgaaataaatggtatagtatgttaaagggcgacatataaaaaatactctatacaccgtatttcacccagtctaaggtgccatcatttgtaaggcaccactattttttggtaccaactagaaaaaaaatgttgcaaatcaagtgatgagactccatcaactgtaaaatgaatttttatttcagagatattaatgtgtgaaaaaatgtgtcttgagatcaatgaaatatggtaatatgttctataatatatacctaattaatatgtaatatattagaatgtggttttcatgattaacttctggcatgggctaggttttgatagcttaacagaagacatggtatatcagagggccaggggtaagtatctgaagacacctcctgtttttactacaaggaatcagactagttatttgaaccataaggctttgactcaagaagtcctcacagtggctgtgcccaagtcccaggctaggcattactattatcattaaattgtttaaaagtgactgatctagccgttcttaaccagggacatgaatcagactcatctggacagtatttctaaaattcaggtactaagttatatatttagtagaatttggaggtggaaggcagattgcaggaatatgtaatttgagaaagttctccaaaagattcaaatgtgcacccctagttaaaaaaaaaacaaactcagatatgggccaattttcttgtttaataattaagaaaattgagacccagagaagctatataattcatccaagtccacacagatggtgagttattgggcctaggatcaaatcgcctgattctgaatcactttcctctttttactctactatacttgtcttggaaactgagacccataatgtcatggcctgggtcaccatgtgcagagaagtatcataggctatgcccaaactcaagtcacttaagcctctgatttccctccggagagcagcttctctgtgactgaggcagccacagcacctgtggcccagggctaggcctctcctcgggcaaggcaagaaaggcctgacttggccagagcaggagggtcagactgggtcccacaaagccagctgagggaagtcatctagcttgaagacataatcaatcccttttcccaacaagatgaaacctacagaatggtaaggatggaaggggtcttggaaatcatctggtcctggttttcccaaaccttcttctttgtaccagctggcatctttttgaaatgcagcttcctgggcccggcacagtggctcacacctgtaatcccagcactttgggagaccgaggcgggtggatcacgaggtcaggaattcgagaccagcctgaccaacagtgtgaaatcccgtctctactaaaaatacaaaaactagccaggcgtggtggcgcgcacctataatccaagctactcaggaggctgaggtaggagaatcgcttgaacctgggaggtggagcttgcagtgagccgagatcacatcattgctctccagcctgggtgacggagcgaaactctgtctcagaaaaaaaaaaaaaaaagaaatgcagcttcctggctctcaccctactcttgttttctcattttctgtagggctgggcctgagagtctgtattgtaaaccatccttatatcaggctctgatagtcgatgtgagaaccttttctctcatccagcatttgcagtagtattgtgcagcccttcagggggccacatagttcaaggtcacctcggaagttaggaagagttcagacttgccagggcctctaattctaattcatgtatgtttcccagggcagtggactgcactgtgttctgagcctctgggccacgcccccaggcagactcccctccccgcagcaggccagagccattcttgtagttctcaagtgcattggggtagacattggttaagcccctcgtgccagccaactgcagtgtagctttacctggtgcacctgctggggagctgggagtttccaccacaggcttcccagataggatttctgtcagcggctttgacagaatgcctctgtccacacagcctcccccaccccaagcagcaggtaatggctgacacttaaatcaggcaacttttaaacttaacaccactgagaggccttgagttggggaccagaggttgctcctaaaggcagggagcaggttgaaggagcctccgctctctctgagcagcctgtgctgtgccccacggctggtcacggctctgcaagaacccacccagagtgattcagaacaacaggtggagtcagcgctcgataggaaaactagatacctgcttggctccaggccctggagcggaatgtgtccacgtactgggcgctcattcgcttgccttcctcagcacacggtttaccctccctgagccaaggcagaggagaacccaggccctccatcagcagctttgcctgctgccatccaccgtttgctcttctcctagtcaggctgcacccgtttctggaagccaactgcagtctcttctatggagacagcaggcagacctggtcatctcacacacaccctctcatctgacccacacaccaccccagaagggagggtgaggacaacagtgttcctcccatttaacagattaggcctctgaggctgggagaagaggagtggctttctccaactcatatggctggtgctgctaataagaaaagccaacattactgagtgtttattctgtgtcaaacgctgtactgaatgctttttgttgcctctcttcgacttcacagcaaccttatgttgttgttactgttattcccctcccttcacagatgtcagagatatttgataactcgcctgctgagggataggattgaacccaggtcatatgacttcaaagtgcacacacttaaccaccgtactggtctgcacccttctgtctcctaatccagtgctctttgccttttccttgctgccctgtcagagaaccccagctggggcctcaaacctgtcccagtctgcctcactgtgttgactccagatagcccaagagcaacccaacctgcctcatggtgttgggccgaggccagtcatagcagtgagtgttctggggtcatgcagaggcagccctcaacgatagaatagacaggcccatttttaaatccatcaaaagacctccaaggctccccacccactagcctgccctgacaggaaacaggttgttaagagtctcaaatgtcaggccgtggtgctgttttgcacaattgccataggccagcgctcatttaccctgccttccagcttccctccctctgccttttaagcatagatatgttgcctagagcttgggctgtttctggaaaacagagttgttttgggagttaaatgagcttatttaagtcaagcagttagaacagcacttgacactagataagggctttggaagtgtttgctattatagctgtactttctactctttcttttcttttctttttttcttttttttttcttttttttttttttagatggagtttcactcttgttgcccaggctggattgcaacggtgcgatctcggttcacagcaacctccgcctcccgggttcaagtgattctcctgcctcagcctcccgagtagctgggattacaggcatgtgccaccacacccagctaattttttgtattttaattagagacggggtttctccatgttggtcaggctggtctcaactcccgacctcaggtgatccacccacctcggcctcccaagtgctgggattacaggtgtgagacaccacgctcggcctgtactttctacattttctacaggagacatgtattacttgcaagctaacataatgaggtacttagcataagttctgtagccccagtggggatctctgaaccaggaaaagggtaacccccacagctgggcacagatgccaggagagggatgattgaggcatgtccgctcctctcctctccatctaggtccctactaacatgccccttcctccacttcccctcttctttccacagaaatatttgtcccagctggccgaggagggcctcaaggagaccgagggggcagatagcccgaggccagaggacagcggaatcgtgccacgcttcgaaaggaaaaagctctgatgcttctgcttctgctgctactgctgctgctgcaaggttggaaaggagagcttgctgaagtggggccttcctgattctggggacaggactaaagcctgagaggaaggaaaaccaagcagggcacattgcttgggcttgttcccagagactcagtgaaatgcccctgatatgtctccaggagcaagtcacccaggtgtgtccagcccactgagggtcaccaactctctccctgctgactcttgtttctctcaatctttcaattcgtttttctctcttttcctcttgttctttctctccctccctccttatgtgccaaggatcgtttccttttcacaaaacccaacttctcagggattttcacagtgtttaaattcttggtaggatataacaggtcaggcctagctgagtcaggcaaggaaaaggtttaatggaaactcctgggtcaggcgaacccctgcagtgagtctacagcagtatctctgcctggtgtcccatgtatcccctgcatgaggagctgagtcaggtctgcagtcctggtgaggggacatcacggacaatctgttggcagagctgggagggtcttcattaacctcttcctccaactgggccacccttttgaaaagcccctgtttttaataactgtttcatcctctcagttattctagaaatctgccagacttatgccttaaagtaaaattaaatgaattttagagaagatgaaaagagcccttcattttggaagctctgataagtttcctccaaacttattcccctcctcttgatttcaggagatgtcagggtttttctattctggacaatgaatttggtacagagtcactgtaattaaatataaaaacagaagcatcttcctccagctaaagcagcagttggcgcgggcttaggttgaatgctggcctctctgcaaagcacagctttggctcgagaggcacagctccaggctgtggaaaacagagttgtcttgggggttaaatgagcttatttaagtcaaggaaacatcatctgtccttgattcagccttggtgcctgcactctggggtacaaccacctcacagtaggatggtttttaaatggccccccagttgggggagaagctaaggaaagagaaggctgcagatccaaagagtggcattgaagtttgctgggtgtctgtaggtggaccctttccagctgggcagatagttgagggctccctgggtttgactgtatgtgcagactttgataccaaaatgttatgaaaagtcgtgattcccgctgctctttctggtactggagggtgggtaccttcaggctgtggggtctctagcctgatattccattgaaagggtgtgggataaaggtgctgggggaaatgaggctctgccacagccatagagaggccctcgggcagttaagaagggagcctggagctgttttcatgagcagagatactctcctgaaagcacccttcatagcttagcccaggaaaaataaaacaaggaagacaggtcactctcccctaggcagttcctgttgtttctgttcctgaccttgggcaggcagactgagaagggactgtgtagggttttgttttgttttttttcattttcctttttatggcatgtgagagcatactgtacattctgtcctctgtactaatggaggaagggcagagagattagttcaaggctaacattttatatcaggtaactgaggcacacaaagggaacaaatgaagaacataaaatgatcagtgtaaacctgaaagcacgcagtcattggcaagggacaggctcatgggagctggtgagagagagcagttaaggcaagcaccaggggaaagcagaccaacttgaacagatgtgatgcggagaggttggaagaagcaagaaacctgaactcatcatcaggctattaaataaaatttataggaggctgttggtttggactgagctcctgcaataggcccaacagaccaaaacaaaagggagtcactcatgttgaagttctgtcttccaggaaatcaggagagagagagagagaaagaatagccaaatccccaaacaggccagttttaaccagcatgatgaagtgtccttggttttaacctttataaggaaagcagctttgagatgaccagtctggtttttgttctttgtgtctgctttcctcagcccttttctgtctataaagccaacctcctccgctcagctcatgggaacactcattctattttatagaatgacatgttgcccaattctagaatcaaaaataaaggccaactaagatcttcaaagtaaatttgttgtaattttatcttttgagaagaccatatgggggctgctgaaaagttggtatctcaaataaagtctgaagatcacggctcagcccagattgttcccctggccaactccacaggtttgaacctggcattctggacaccagctatgcctcctccatttctcagaaaacctttgatcttgtgtgtctttcttcctactgaagggaattgtgggggcagttctttggccttcttgctgaactttgctggaaatagcccacaatttttatcagaggttagaactgtacattatcagagagactggacactttatcccctagcaaagtgggagaagattttaccagctcattccactccaccctggccttcccccaccccccatccccagcagcatttccatggaaatccagatggtcgtgtagtgttatggctctcttgtgatagactggccttcatattggagagctagggagagcccctgggagggagagagataaggcgctatctgccttcaatcagaaccttcggtttaaaatcatctaagagtctatacttgtgtgtacatacgtatttatttttatttatttttatacaattccattggcatggtccttcaccgaccctatgatttgcactttttatttctatgtgtgccacacacaatgcagtattaatggcaaccaggtaaatattgatttattttttaaagcttttcttcagtgttttgtcaaccatttcaaagtgtctcccaaaaaaggatgctgaagagcaattgctcccttaagcaacagattcatatttaccctgggttaatacaacaaaaggcctgtataattgtcttttcattgttaacacccaaaatagcatctatctagacagtatccccaaagaatttggaaaatctgatggtgtgagcagcagccgttagtatcagggtttcccattcttggacagtccgaggctgtgacctgttagataattagattatacttgaactggaccagagtttgttttttgaatttatgagaaaaaccaaaacactaagttaagtttgaacttgtaaagtattgaaatttgttgagtgtcctataaattgtcactacttttcctgatctgtataactgactgcaaagtgtttgtttttacaaaagagaaaagaaaagatttttaataaagagaatttgaaagctgtgagtgagtgactctgtgtcatgcaggggtccctgacatttggctggggaaggctcatcaagcagaaaggttgagatttggtccctttgaattgtgaattattttcaagggttgaacagagaggacaaaacaggttttcttagggctccagttaggctaccagagagaatcagagattctcaggggtgatcctcgggggatgagtctgactaagtgggggctgctgtccttttggaggctcagatacgaacatttcttggcctcttataaactcctagctttgccacccagcgtcctgcaccagggttaggccatttctgtaagttccattccctgtgaagatgaatatctggtggtcagtgctgtagtggaaatagcaggcacaggcagaggtctggccctgcccctgttagcccatgacttcctaaggcccgcttccttgggtgtaaaagaagataagagtattacttgctccgggtgtggtggctcatgcctgtaatcccagcactttgggaggccaaggtgggtggatcacaaggtcaggagatcgagaccatcctggccaacacggtgaaaccctgtctctattaaaaatacaaaaattagctgggcgtggtggtgcgcacctgtagtcccagctactcaggaggctgaggcaggagaatcgcttgaacccaggaggcggaggttgcagtgagccgagattgcaccaccgcactccagtctgggtgacagagcaagactcagtctcaaaaaaaaaaaaaaaaaaaaaatgaatcgcctcccagggttgcttcagggttaagataattgctggtggaagcacttggtgtgctgcaagtcaccgaatcttgtttgtttttgcaatctggacagcagccctccaaatttcaggggttcttaagttgtttctcaaccatttcttctagcaaaacaatgccagtcttctaggcccagttggccagtcctttgaatggcccggaaccttctctgggcccttcccttttgttggcagtgctcctgagtcaacagggaggggctgggcagcctggacccagagggcaaagtgagggggccgcctgcaattcctgggaacagattgcaggtctgaggaaagttcctgctgagcctgttgctgtctgcgccccacccccacctcctgtggccatggtggaccaagctcaggcctccagtttccaaccaggaggagtagggaaacctccttttctgcaactgctatctatgccccagatggccaaagcagtgaatgggcctagactggttctgctgccctaagtacaggatccaggatgcttgggggtgcccctggtgcctagtcctagcatgttgttctatgtggcacaactctagagagggcatccacattgtatcctataggatggcaccccctggagttgtgcaatgcagacacccagccagggacacccccttccctcgagttgcagttgttcccccaagcctgggtgttcccatttgctctctgatatctctgtgggccctagagcctggttctgagccagtccaccaggctggacctctgacactcagacctactccctgtaccacacctatccccagggatcaactccagactgcccctgcctgactctgccacagcctagacactgggattcctcctcataatgccctactaggtcagggcacttggatactaaccttgctttcttttctttgtttgtttgtttgagacaggctctcactctatcacccaggctggagggcagtggcacgcgatctcagcttgctatagcctctatttcctggatccaagccatcctcctgcttcagcctcccaaatagctgggactacaggcatgtgccaccacctctggctaacttttttttgtagagatagggtttcactatgttgcccaggctagtttcaaactcctgggctcaagcaatccacccacctcagcctcccaaaatgttgggattacaggcatgaaccatcaaacc

SEQ ID NO: 775 - DNA, 7130 bp, Homo sapiens
gtggcacaatcttgcttagtgttaaagtctgtgctccagagctgaaaacaaaaggagtgctttcttgttagtgagaactgaggaaagaaagaaagatgcctgtctgcccacacctgcccttcccgtgtctccccaatccccatcaccacctcataccaagtctctctccatcccatccacactggctccaaagtaaatgtgtccgatggcccctttgcacagagttcaaaacctagggtggcttctcccagataagtcttcgtcctgtcccccagggctctggccaatctggccctaaccctttaaggctgggccagagctccagccccccaggtcccgcttgcctcacaggtgctgcctctgcattactgtctgtcactttaagccaactacgagtcacttgagggaccttgtttaattctcccgtgtgctgtggcagagctagacattcaggcaacaccgctggatgaaaagactgcaatcaaatcagagcatctaccctactggggcacatctgagccaagtactgccctactggggcacatttgagttacaattttcaccatcaccatccctgtcatgacaaatagcctttgtgaataaaaatctcttggttaatctgcctactaccttagcatacattcctaaaactggagctactgtgatcaaaggctagaagttttcttttttttttcttaagcttcagttacatatggccaaatttaatggcactgaaaaggctaacatattaagatggaaaaaatttacaagtaatataaacattataatctcaattttgtttttaaaaataacataactttacaggttaggataaaatgcaccaaatttaacagtgattacctgaaggtaacagaatcatagcaatctttattttttccttgcgtacatttttatgatatatacagtattttttcataatcagaaaaaaaggcttgaaatttataatttttaaaaagcctctcctacaaataagcacatgaaaaaaatgttcaccatcaacagccattagataaatacaaattaaaaccacaatgaggtattactacacacatataaaaatggctaaaataaaaaaatgacaacatccaatggctagcaagggtatgaagaaaccagattattcggacattgctggtaggaatgtaaaacagtatggacaactctggggaaaaacttggcagtaccttttaaactaaaaatgaacttaccaaatcacccagcaagtgtactcttgggcagtgatccaagagagatggaaacttatgttcatgtagaaacttgtacatgaatgttcatagcagctttattcataaaagccaaaaactggaaattacccaaatgttcttcaacaggtgactagtttaaccaactgtgacacatctataccaaggaattctatttagcaataaaatgaactatcaaatgtcaggtgcaaactcaagggcattatgctgagtgaaaaaaagataaactcaaaaggttacatattgtataattccatttacataacattcttgaaatgacaaaatcatagggagggagaacagattcctggaaattcaaatacattcatggttgccaggggtcagggtgcagctacacacagcagcatgaaggagcccggcagtgactgtgcagttgtatatacacacaaatgcacatgtggttttacctgagaaatttgcgcaagttctagggattgtatccatctcaacttcctggtactgatgctgtactatagttattcaaggtgctaacactgggcaagggtgggtaaagggggcatgagatctcacactacacttctttgcaacttcctgtaaatctataattatttcaaaataaaaagttttaaaaaattcagccacgtaaaaatgtcaggctcatcccagacttacgcattgagtgttgctataaggcagagacagatgccttctcgagtacggaaattcttgtgtttgaagcctccaagcattctgtcccatacgtactgcagatgacaaagaacaggtgaggaaaggagaagactgctgcagctgacactttataagggagcaatagaaggcaagcctcttaacgagcgccaaattagtcccatcctctaccaacacatttaatcctctcgagagcatactggaaaatgatgacatctatcatgttatcaagtatatcaaattacaatttttaaaacacattcatttacataattgcatttaattctcccaagaaccctgaaagagaggtataactgtcctcattttatgggtgaggaaagcaaggccaaaggagctagtgagttgccaaagatcacacactcacactggcctctgttttttctgatcaccccccaataaaggacagtagaagctgggaaagcagggctgttttggtccatcccagcagccccaattcaccggaagacaggggccagggctccagccaggcctcctgactccccagacaccacagctccctcttttcagagaattggagagtcggttacataaatgagctgaagagtctaatggattaaaactaagtatattagattcaatacccccatgttaaatccactaatttactcatctcatagttttgtgacttatttaaatatcttgcatggggaaacagattgaatgctgtgaaaatttttatctgtaatacatcagcttaagtctatggagtcacaccatttgtgcaagtacacacacacaccctcgcacgtgcatgcacgcgcactggccagctgacctcaaaacacatctcttgcccctacctggggattagcagcttgatccatgatctttagcagcagagtttggtcctgctccctcacagagtctttagcatctcctagtctgtctattagacttggcagcactgaaaatcaaaatggaaactgatcaaatgaaaccctatttgggggtctgtggtcaccaagtattcctatctcaattatgtgggaagacaaacccctgacctaaatgatgtatctcattctaaaaccactcatctttgctcacagctctactctccttgctgaagtccatgaaagtcaccaaaagagtctgcaaaatcctttgcatggacagatacactatttgtcttcctccttaccccacgttcctccagccagttcccaacgtatttgtaagctgataaaaatggaagaccttgagaggaagagtcaacagaaaggaaaatttaggtaaaacacaaggagaggggctccagtatatgtgtttgggggtggaaggagtgggcacttatgaataaatcttaagtttcatcactattgtgtatttttagttttacatcacgcccatacacacatgagacagagcccagctctccatcttccccgacatacccagggtggaccctcccaccagtggtccaagtgcacctgtagaccagagatcagcttattttaagagtttgtaaacctctattacatgagatatccctgaataattcagctaatttaggaggaaaatggaacactattaaaatatcaaatgtctaaaagtaaaagctttttttaaatttgtaaacagtcggtgctcatgaccttttcagaaggagcatattggtcggaaagttaacagtaaagaatacatgtgtaccaacgtaaaacagagaaattccataaggaaatggttgcatagagatgcttagtgtttatactacccccatgaaacaccggaggtcaggaatttagaggtatttaaatctatgaaatctgtgggttttgtttcattttgctgacatactgttttcccttcaaaataagagtgaacatttactatacatttgtaatgacatttacaatcaaggtgaaaatagtcatgccaaccataatcatctggagaaaaatacaactggcttggttttataggatttctcaaggaaaactgcctctcattaaaggggaccggggtcagggtaaaatatgacttggttggcactaaagagtgacagctaatttagcataagaaataaaaatggcactaatatttcatattagaacacgtattactaagttccgtgtgagaacacagtgaagccagtacaaaggtatgggggagggtaagggcgcccgcaggcccagaggccaggggagtccagctggaagggaaggcagcggggcggccgacccaggctgcgagtgcttaggggggctgcgggggagggcggggactggctgtttgggaggagcggaagggagggagagggggctggaggggaggcagggtggctgccgggagggtttgggagccggggaggccgagggaaggctgggggtctgaaggggccgggtccgctccacaagtgccgcagctcacctgtgccgatctgcgccttgaaccgatcctgcagccgggtcaccagggcggacaggatgtccatgcccagcagaaccacctgcagcgggaaacaccgggagcctgttagcagccggcctgcggggcagcgctcccgcccacccgctccggggaggcctagacatttccggcccagacgcagtccgagagtccagacgcatgccgactggaggaccaaagagattagcacgaagaaggatgatcttccacaaaaagagctatgtacagctataatggaaaatactcggtgaggagaaacgaaataaaaggcaatacagcgtagccaaacccgggttagctgcgggtggagttcaagagcgcgccgcggtcccgcccccgccagccccgccccggcgagaaaagcgtatgcaaattttcgagcggccgacgcgcggtcttctgggtaaaaccgagccgccgcttttgcgacccttcgggagcctcagaaaacaaagaattggggtgtcgtcgaaagctgtggaggctggaggtaagctagctaccagaccgactagggcgaggctcacgaattaattaccacaaccctaccaggtattggcgcttcctgcttgcagcccagggactttctattataaccatccttttcttggggttgcgctactgtccaatgagcgcatagtgagggcagtactgctaacgcctgaacaacacacccgcatcaactagagcttttgctttattttggtgcaatttttggaaaaatgaaaacctgttttcatagacttatcagttcaaacagcagtaattcgtaaataaactagtactttgtggttaaaccagtagagggtgcacaagacgcgtggttttagtgtcgcaagtaaagttctttcagtttttgcggtgattaaacgggaaggatttcaacagaacttcacccctttaactttacgccgatcatcaactgttctgtaacttccttatgctgagtcagcccagtagtctaggtcaagtttcaataggagacgaagtttcagtaggtctttgcacctcacataaaatgtaatccaggtcgggcgcggtggctcacgcctgcaatcccagcactttgggaggccgaggggggcggatcacgaggtcaggagatcgagaccatcctggctaacacagtgaaactccgtctctcctaaaaatacaaaaaattagccgggcgaggtggccggcgcctgtagtcccagctgctcgggaggctgaggcaggagaatggcgtgaatccgggggggtggagcctgcagtgagcagagatcgcgccactgcactccagcctgggcgacagcgagactccatctcaaaaaaaaaaaaaaaatagtaatcccagcacttggggaggccgaggcgggcggatcaggagctcaggagatagagaccatcctggccaacatggtgaaaccccgtctctactaaaaatacaaaaattagctgggcgtggcggcgcatgcctgtagtcccagctacttgggaggctgaggcaggagaatcgcttgaacctgggaggcggaggttgcaatgagccaacatcgggccactgcactccagcctggcgacagagcaagactcggtctcaaaaaaaaaaagaaaaagaaatgtgaaatagtgagctttttgtggaatggtccaatagtcagattaaacccttcctccgtatgaagcagttttgcactgtgagacttcattaaacatgcttccaacacaaagccgggcactgcccaatgttcacacaacaaccaaacaggacggggcaacagttaggatttcttgtatacagcctgtgcctgcctgcctctggcggctgataaaagcaaaaactgcagacttttctattcagctttgaaatctactgcttcaaaactgaaggaatctaaattggcccaataatccccacaatacataaaatgttcttgcaagaaactggctacttgacaatattgaagaaaataatttttaaaacttttataaagagaacaatttgtaaacagattttttaaataatataataatggtataaacactttaaaataatgactctactttccagctaaaagggattaggtttcacactatgacttccttccagagtacagtatgaagtggaggagtaactatcctgcggagaaaactgacagacgcaacctcagccagatggtggaggtcaacatcaagtacacgtcatatgatgtcatgaaaacggcattttgcctgtgacagtccttcccaagacccttaagctcagtctaaacatgaggaaaacatcagagaaattccaatagaggggcatcctacaaaacacctgaccagtacccctcaaaactgtccaggtcatcaaaaacaagaactctgagaaactgtcacagcaacaggagccaagggaaacataacaactaaaggtaatgaggtatcctggaaaagagtgtgcaacagaaagatgacatttttccttaggtagaaactaaggaaatatgaataaagcatgaactctagttaataataatacatcaatactggctcattaattgtaataaaccacattaatgttagatataataatgagatatttgtaatttttctgtaaaaaagtttattttttaaaaagaacagcccatcacttaagtgagttatttagcttttgtctggtgaaatcttaagcttatctgcacagttgcattactggttgcaggtaggggtgttattcatgacagaaacatccct

SEQ ID NO: 776 - DNA, 35072 bp, Homo sapiens
tctgattggtgagcgatggtggtaggtaaaaccagtcttagagtcatggcagttcattttagcagctattaggtaaaactggtcttagggatacagaaggctggttcagcagttggacttgtggaaaatttaattcttgaagcagatgctgtgtgccccgaatgcttcttccccctggcccttcaactctgatttagttgagtatttcaagaatgacccaatttatgtaatcaactttcacaggtatacatgtcttaaactttaaacagatgttttgggttttgttgttgttgtttttgagacggagtctcactctgttgtccaagctggagtgtagtggtgtgatctcggctcactgcaacctccgcctccagggtcaagtgattctccagcctcagcctcctgaatagctgggattacaggcgcccgccaccacgcccagctaatttttgtatttttagtagagatggggtggggtttcaccatgttggccaggctggtcttgaactcctgacatcaagtgttctgctcacctcagcctctgaaagtgctgggattacaggcgtgagccactgcgcccggcagtctttccttcttttttttttttttttttttttttttaatgacatggggtcttactttattactcaggctggtctcaaacttctggcctcaagggatcttcccaccttggcctcccaaattgctgggattacaggcataagtcatcatgcctggctacaaacagatattttcaataagaggataaaagttcatttccccatactttgctaacatcaaatgttattaattcctaatagttttgccaaactgagaggaaaatggtatgttagtttttctgggttttctttctttttaattttttttcttttttattcatcgcaacactattcacgatttttttattttttattttatttatttatttttttttttttgagacaaggtctccctatgttgcccaggctggtcttgtacccctgggctcaaaggatcctcctgcctcagcctcccaaagtgctaggattacaggcatgagtcaccacgcctggttcacaatttctttttgtttttaccaaaggcaggtatattcctgaaattttttgtttttttgttttttttttgagatgaagtctcaccctgtcactcagactggagtgcactggcacgatctcagctcactgcaacctccgcttcctaggttcaagcgattctcctgcctcagtcttcaaagtagctaggattataggcgccgcaaccatgctcagctaatttttgtatttttagtagagacaggatttcaccatgttggccagggtgatctcaaatcctgacctcaagtgatccgcctgcctcagcctcccaaagtgctgggattactggcatgagccaccgtgccaggccctgaaatgttatcttagttattaatttgcaattccttggctctagaggttgggcatcttctcagatctctagtggacatttggattttctttttggtgaactgtccagtttttctctctgctttacaatctttattatatgcaatcttcacatgtaggtactaccatttttttagtttgtttttgaaacagcatattgctctgttgcccaggctggagcacggtggcaaaaacatggcttactgcagcctttgacctccttggctcaagtactcctcctgtctcagcctcctgagtagctggtaccacaagcccataccaccatgcccagctaatttatttttgtagagatggggcctgaccatgttacttgggctcaaatgatcctctcccactcagcctcccaaagtgctaggattacaggcatgagccaccatacttggcccttttttttttttttttttttttttttttgagacagagtcttgctctgtctcacaggctggtgtgcagtggcacgatctcagctcattgcaacctccacctcccagtttcaagtgatttttgtgcctcagcctccctagtagctgagattacaggcatgcaccaccatgcctggctgactttcatatctttagtgttgccatgttggctaggctggtctcaaactcctgacctcatgtgatccacctgcctcggactcccacagtgctgggattacaggtgttagccaccaccccgacattatttgaaacttttattttatcatgagagagttccaggagtcaactgaagacagatttttggtatgaaaattacatatgcaaaaagactgattccagtacatgaaattaaattcaacatttacattaaatgccttcaaatatggtaaaatggtttcttttggcagtttacctcattatgttttgaatgatttgtctatcatatgaaataacttttataaatatagtaactcaggcctgggcacagcggctcaagtgggaggactgcttaagcaaccgagtttgagaccagcgtggacaacatggggagaccccttctctcccaaaaaatagctgagcatggcagcgcactgttaaaggaaacagagtttctttggtgggtgattaaaatgttctggagttagatagtggtgatggttgcacaaccttgtgaatatattaaggtttccgctcaatctaccattcaattgtactctctaaaatgattaattctatagtatatcaattatatctctaaataataaaaacaaaaagaaatggctgggtgcggtggctcatgcctgtaatcgcagcactttgggaggctgaggcgggcggatcacaaggtcaggagtttgagaccaacctgaccaacatggcaaaaccccgtctctactaaaaatacaaaaattagctgggcgtggtggcacacgcctgtaatcccaggtactcgggaagctgagacaggagaatcacttgaacccgggaggcagaggttgcagtgagccactgcactccagtctgggtggcagagcgagactccgtctcaaaaagaaaaaaattaaaaaacaaaaagaaacctggttctatattttgtttaaatttatttttttaaccatcatgtaatatgtccacgtaatttgtttaaattttgacatcaaatgcaattgtgagaatttttatgattcagaaaaatctaagcaagctttataaaaacatacttttttttttacttttttttttttttctgagacacagcctcactctgtcgcccaggctggagtgcaggttttcatgtttatctgtgagatgtacctttggcacattactttcctgacatgagatttaaaatttttttttttatcttgtgacaatttaacttttttgacacataaaaattgtacatatttatttgtttgagatggagtcgcactctgtcactcaggctggagtgcagtggcgtgatcttggctcactgcaacctccgcctcccgagttcaagagattctcctgcctcagcctcccaagcagctgtcattacaggcctgcaccaccacacccggctgatttttgtatttttaggagaaacagggtttcaccatgttggccaggctggtcttgaactcctgacctcaagtgatccacccaccttggcctcccaaagtgctgggattataggcatgagccaccgtaccagacccctaaaaattgtatatatttaaggtgtaccatttgatgtttagatatacattgtgaaatgattacattccacatattacctctacggagttaccatttttgtacacttggtcaacatcatcccattctccccttcctccacagatatttcttgtatactatatagaagccaagggtattttgggggaagagctcaaagttcctttcgtggagttaaaaatatatatatactatgtacatataagccatttagcaaccctagatgcttaataaagaatactggaggcccggtgtggtggctcacacctgtaatcccagcactttgggaggccgaggcggtcggattacgaggtcaggagttcaagaccagcctggccaacatggtgaaaccccatctttactaaaaatacaaaaattagccgggtgtggtggtgggcgcctgtaatcccagctactcggggggctgaggcaggagaattgcttgaacctgggaggcagaggttgcagtgagctgagatcacgccactgcattccagcctgggtgacagagcaatactctgtcgcaaaaaaaaaaaagaatactggaggctgggcgaggtggctcacacctgtaatcccagcattttgggatgccagaggcgggcggaatatcttgagctcaggagttcgagaccagcctacacaatatgctccaaacgccgcctctacaaaacatacagaaactagccgggtgtggtggcgtgcccctgtggtcctagctacttgggaggttgaggcgggaggatcgcttgagctcgggaggtcgaggctgcaatgagccgagatggtgccactgcactctgacgacagagcgagactccgtctcaaaacaaacaacaaataaggttgggggatcaaatatcttctagtgtttaaggatctgccgccttccttcctgcccccatgtttgtctttccttgtttgtctttatatagatcaagcaggttttaaattcctagtaggagcttacatttacttttccaagggggagggggaataaatatctacacacacacacacacacacacacacacacacacacacactggagttcgagacgaggcctaagcaacatgccgaaaccccgtctctactaaatacaaaaaatagctgagcgtggtggcgcacgcctatagtcctagctactggggaggctgaggtgggaggatcgcttgagcccaagaagtcgaggctgcagtgagccgagatcgcgccgctgcactccagcctgagcgacagggcgaggctctgtctcaaaacaaacaaacaaaaaaaaaaggaaaggaaatataacacagtgaaatgaaaggattgagagaaatgaaaaatatacacgccacaaatgtgggagggcgataaccactcgtagaaagcgtgagaagttactacaagcggtcctcccggccaccgtactgttccgctcccagaagccccgggcggcggaagtcgtcactcttaagaagggacggggccccacgctgcgcacccgcgggtttgctatggcgatgagcagcggcggcagtggtggcggcgtcccggagcaggaggattccgtgctgttccggcgcggcacaggccaggtgaggtcgcagccagtgcagtctccctattagcgctctcagcacccttcttccggcccaactctccttccgcagcctcgggacagcatcaagtcgatccgctcactggagttgtggtccgcgtttttctacgtcttttcccactccgttccctgcgaaccacatccgcaagctccttcctcgagcagtttgggctccttgatagcgttgagtggaggccctgccgcgacttggcagtagcttattttgttcactcctctctggctggtgtgggggaggtgggggcattaggccagggtgaagcaggggaaccacttaggagtctgttaagatgatctgaacttcagaacaagatgttattaacagagtgaaagtatttggattctgggtatattttgaaatcggaggcaacaggtttttcagatagattcgataacggaggttatcctgaatagttgaaaagataaagttgccttttgctgaggtgggaaagagaagattgccagtagagcaggtttctcaggagttcagtcttgggcatagcatggtaggggtgaatttggctggagtgagttggagagtaggagaagagaaatccaaggcaacatttgaccagcctgggcaacatagtgtgactccgagtctgcaaaaattagacgggtgttgtggtgcgcgtctgtggtctcagctacctggaaggttcaggccttggaaggctcagggaggtggaggctgcagtgatctgtgattgcgcctctgcactccagcctgggcgacagagccagaccctgtcttaaaacaaaataaacggccgggcgcggtggctcaagcctgtaatcccagcactttgggaggccgaggcggccggatcacaaggtcaggagatcgagaccatcctggctaacacggtgaaaccccgtctctactacaaatacaaaaaattagccgggcgtggtgacgggcgcctgtagtcccagctactcgggaggctgaggcaggagaatgtcatgaagccgggaggcggagcttgcagtgagccgagatcgcgccactgcactccagcctgggcgatagagcaagactccgtctcaaataaataaataaataaataaataaataataaaaacatcggtaggcatatttcaaggaattctatttaaaaaaaatttttttagagacaagttcgctctctgtggcccaggctggagtacagtggcatgatcctagcccatggcagcgttgatctcttggcctcaagcgaccctcctttggagtcgctgggcctaaaggagtgagccaccacgaaattttattataaatggagggtagagaaattgggcaataaatggagggggaagtgagttaagaggaattttaattatgtgtgtgtggttttaaaagaggggggtcttgctctgttgcccaggctgctggggtgccagtggcgcaatcatgaatcactacagccttggactcctggcctcaagctatcctcccacctctgcctcccaaagtactgggattactagtgtgagccactgcactaagataggagcaacatgtttcagcatgtttgtgggttgataggaaagatgagaatgggaaagttgatgtcggaaagaagacaatggctagagcaatgtcctagagtaggtaagaagggatggatttggcctttgttggaaacattagcggttcttttggtgacagctatatagttaacacatctatgatacgtgaatgggcagataggatggcaggagattttgaaagttctcttgattcttactgttctcttagtgaaagaagcaaggttatcagctagaagctgggatgggagaggaaagagaagatgggaagtagatagttctttagaagagtgggcaagggttggactagggaagtttagtggaaatattgctaggcaacataaagagcctacttgagattcgtggtcatgagttgaaggagaccagacagcaagattgtgtatgagggcacccacagagtaaatggagagttgaaattaatgcagttgtgattttaccacgtggatatgaagaagtgagggggagaagtacaaaggagttctcttaatgattgaccatggaatttaagctggctaagaaaggaagtgagaggccgggcgcggtggctcacgcctgtaatcccagcactttgggagactgaggtgggtggattacctgaggtcaggagtttgagaccaacctggccgatatggcgaaaccccatctctaataaaaatacagaaaaattagccgggaatggtggcaggtgcctgtaatcccagctactcaagaggctgtggcaggagtatcccttggacccaggaggtggaggttgcagtgagccgagatcacgccactgtactccagcctggacgatatagtgagacttcacctcaaaaaaaaaaaaaaaagaaaggaagtgaggattttaagaccctgagagacagtttaaaaagtgggaggatcggccgggcgctgtggctgacacctgtaatcccagcactttgggaggccgagttgggcagatcacaaggtcaggagttcgagaccagcctggccaatatggtgaaaccttgtctctactaaaaatacaaaaattagccgggcatggtgtcacgtgtctataatcccagctactcgggaggctgaggcagaaaaattgcttgaacctgggaggcagaggttgcagacagctgagatcactccattgcactccagcctgggcaacaagagcaaaactttgtctttaaaaaaaaaaaaaaaaaaagaatacaaaaattagccgggcgtggtggcgcgtgcctataatcccagctacttgggaggctgaggcaggagaatcagttgaacacgggaggcgaggtttgcagtgagccgagattgcgccactgcactccagcctgggcgacagagcaggactcctcttggaaaaaaaaaattagctgggcatggtggcaggtgcctgtagtctcagctactagggaggctgaggcaggaaaatcacttgaacccgggatgtggagtttgcagtgacccgagatcgtgccactgtactccatcctgggcgacaaaatgagactctgcctcaaaaaaaaaaaaaaaaaaaaaaaaagtgggaggatcaatgtactgccagtcctaatgaagtggaatgattgtccccatcaaatcactagtaggagtaagttgcagagcctagaaggtgatggttaagagagtgggattcttgaaactgcatttatggagaggttgtggttattggttataataaataaatacagttgaagtgagtgagtagctgagatttggggatgtatcagttcattcttacactgctacaaagacatacctgagaccaggtatttataaagataagaggtttaatcagctcacagttctgctgcctgtacaggcttctcttgtggaggcctaaggaaacttacagtcatggtggaaggtgaaggggaaacaagcacagtcttcacatggccagcaggagagagagagaagggggaagtgctacatactttaaaacaaccagatcttgtgagaacgcttatcaggaaacagcacttggggatggtgctaaatcattagaaatcacccccatgatccagtcgcctcctaccatgcccacctccaacactggggatcacaattcagcatgagatttgggtaggaacacagagctgcaccacatcagaggatgtacaagattgtggtggagaggagtttagagacctgcaaatatagggtaattgaagggatcatctacatggatatttaaatcaccaaaaattatgacaggagtagtgttggagagagaactgcgatgtaaacattaaggaatgaggaagagtgactcggtaggctgtaggtgactgcaataggaaacgataatagactgtgagtctggtgacaagattttccttctttctttttttccccccccccgagacagggcctctttttgttgcccaggtgggagtgcagtggcgcgatcacggctcactacaacctcctcccaagctcaagggattctcccacttcagcctctcaagtagctggaactacaggtgctgaccaccatgcctggctactttttgtcaggattttcaaggctgggaattttgagaggggaatggaggagaataatctgaaagtgcaagtaaggagcagggaagatttcttttttcttttttttttttttttttgagtcggagtctggctcagtcgcccaggctggagtgcagtggcgagatctccgctcactgcaagctccgcctcccgtgttcacgccattctcctccttcagcctcccgagtagctgggactacaggcgcccgccaccacgcccagctaattgtttttttgtatttttagtagagacggggtttcaccgtgttagccaggatggtctcaatctcctgactttgtgatccgcccaccccggcctcccaaagcgcttgggattacaggcgtgagccaccgcgccagccagagcagggaagatttcttccccacatctccagtaggtacagtgatatgaagtgtgtggaggagaaaagaggaaacatctatcatttgagatggctgcgaaaggaaaaggcatcctcagggagctagattttacttagagcaagaaatgaagggatgattcagaggttaaaagagtggattttatgaattactcaagggagcacagtggaagtttcaggaagtggtaggagaaggtagaagatggcagggtgttgggaataatttgagaaatctgagctactggaaatgactgagaatcagatataaaggcagtcctggtggtccgttctggctgccgttgctgtgtaacgaatctgccaaaacttagtggcttgaaacaacaaagaacattttattatctctcattgtttctgtgggttaggaatttgtgagagccgtgctgggcagttttcgtgcggctgtctcgtggttgcacctacatagttgctagagctacagtagctggggactgagcagctagggattggcaggctatctctttttttcatgtagtctcatgaagatttctttatgtggtttcaatgtgtgggctggtttggatttccttatagcatggtggcctcagttggattgctgttttgtgatccttttcatccctccttgtcctgtccccagacaaccactgatctactttctgtcaccatagattagcctgcatttttaagaatttttataaacgtggaatgatagagtaccttttttgtcacgtttcttttatttatcatagctattttgattttcatccattttattgctgagtagtatcccattgcatgtatatactatactgtattcattcgcttgcttgtgaacatttgggctttttccagtttgggactgttaacaagtagagccactatgaatattagtgtataagacttcatatagccaaggctggcagatcgcttgagcccaggagtttgagaccagcctgggaaacatggtgaaacctctatttttattttaaaatcaaaaattaaaaattttctataaaaaattttaaagaagactttgtatagacatacgctttcatttttcttgagtgaatacttaggtctcagggtagatgtattttaagtctttaaggagctgtcaaactcttcctcaaagtggtggttgtaccatgttactttttaatataacagagattaattgagcaaagaaaaattcaaaagttggacagcccccacaactaaataggttcagaacagctcccccattttgcattttgaccagcaatgtatgaaagttccatttgctcagtgtccctgcaaacacctggtatggtcagtctttttaattttaggcattataatagatatagtggcttcttgtgattttaattagcatttcctaatgaccagtgctgctgttgatcatttcatgagtgtatttgccatccgtatatcttttttggtgaagtgtctattcaaatcatttgggttttttttttttttgttttttttttttggagacagtgtctcactctgtcacccaggctgttgtgcagtggtgcaatcacacagcctactgcagcctccacctcctgcgctcagtcttcttgtctcagccttctgagtagctgaaattacgagcacacgccacaatgcctggctaattttttaaaattttgtagaaacaaggtctcattatgttgcctgggcttgtcgtgaactcctgggctcaagcaatcttcctgcctcagcctcccaaagattgggattgcaagtatgagccactgcacccggccaacttacccatcttttaattgaatttttttgttgttgaggtttgagagttcttcatgtttgctgggtacaatatctttatcagataggtaacttgcatgtattttctcccggtttacactttggtttttcattttgttaacaacgtctttttaagaacagaaaatcttaattttgctgaaatctaatttttcagttttttctttgatggttttgagagaggaggtaaaaaaagactaggtaagccgatagttagacagagtcctcggtagaacttcccttctaacaaaaagcagcccaagaaatcacttctcttctaacaaggagcagcctggaagatcgggctgtaaacatgtataaggaagcagctctggcacagagggggagcttcctgggtaatcagcaagcttcacatacgtaaggtgggtatgtgaagtaaacacagtatgtgaagtaaacacagtggaccttagtacatactcagataaggaagctggaagcttgcatgttgtgagttgttggggttgcctgcagctgcacggagagaaaggggtacctggggccaggcatgtccaccatggtggctccacctccccttatttagcacatgcacaataggaaagagataagcaatgtggagtagctcaggccaaggacctgcctgcataataaaaggttggggtgggggatgccagagattcacgctctgtgcagatggcaacacctggtcctaactggttttttgctccctatgtgtagataagctacccccttcccattagctcatttataaaaatgcttgcatttcactgtggaatgggaactcttttcaggacctctctctgcaggagagagctagtctctttcttttgcctattaaacttctgctctagcctcacacccttggtgtgtcagcgtccttgatttcctcagcgtgagaccaagaacctcgggtgccaccccaggcaacaaggccatttcagtttgttcttttgttataggcaatccatgatcacagatttttctctcttttttttttttacacagtttagagttttagttttacacttaggtctgtaatccattttgtattaattcttatatgtggctcagtgtaggtggaaatttggtttgtttttgcataaggatttccaatagttttaccaccatttcttgaaactactatgctttctctattaaaccacatttgtaactttagttaaaatcagtcacatatatcacagggctatttctgactctcaattctgttacattgtctattagtgtatattgatgtcagtactacacttttaattactattgcttcagggtatgtcttgtaaaccaaaaataaaattataggccccccccgcccctgcacaaccaactgaatggacccatcctctcagccaagggcattccaaaattaacctgaaaaactagttcaagccatgatgggaagggggagttggacatgtctcatcacaccctactaccttttggaattactgatagaacagactcttaaagtctgaaaagaaacatttacaacctaccctctctgaagcctgctacctgggagcttcatctgcatgataaaaccttggtctccacaaccccttatggtaacccaaacattcctttctgttgataataactctttcaactagttgccaattagaaaatctttaaatcttcctatgacctagaaacctccctacccccactttgagttgtcctgcctttcctgacagaactcatgtacatcttacatatattgattgatgcctcatgtctccctaaaatgtataaaacaaagctgtaccccaccaccttggggacatgtcatcaggacctcctgtggctgtgtcataggagcgtctttaactttggcaaaataaactttctaaattgattgaaacctgtcttagctacttctggtttacagtcttaaagttagataatgtaaattgtccagctttggtttatttttgtccttagtagttccatataaattttagaatcagcttttcaatttaatacactactttcctcttagatccacaattaaatatatttgatgctaacaattctgttttatgtttttcgttttttttttttgagacaagagtttcgctcttgttgcccaggctggagtgcagtggcgcgatcttggctcaccacaacctccacctcccaggttcaagcaattcttctgcctcagcctcccgagtagctgggattacaggcatgcgccaccacgcccggctaattttgtatttttagtagagacggggtttcaccatgttgatcaggctggtcttgaactcctgacctcaggtgatccacccacctcggcctcccaaagtgttgggattacaggcgtgaaccaccatgcctggccagttctgttatttttaaaacccaagtttccctggtcatatcttggttggatgaagcgtattttcaatagattaccctggaaaggctagtgagtacggtattcttctacattttagacttttcttagtcttgctacttcaaggacagctaggctgcatataaaattcttggctcatactttttccccataaatttctatgagaaagtctaatgataactgattttctttattttgtaacttagtctttttgcttagaggctctctgaggatgggagggggttcttcctcccatccctaggaatttttcttttttttaaattcctaatcactagaccaccaggaagattgtttgttttgttttgtttttattcttcagggaccccatttatacatacgttaaataaatactgtttgccaatgtatcaaccattttgcttcttatttatttttgttcctttggttctttttcatggctttgctttggtgctccttagattttcagtcagatgtatttgtccttgggtaccttgtaatcagtattaccttttcttctgtcgctttgttttctgttcgttttgaaattacttgtttcctggtctggcaataacagttgagatatgaggagtttgagctgccatctgtctatgtatcttgctttaagactgcactcttctattgatatcactggccttgattttgtgatttctttatttcttcaggaccacccttcattttctactgtttgcttcctttttttttgagatggagtctcactctgtcactcaggctggagtgcagtgatcttggctcattgcaacctctgcctcccgggttccagcaattctcctgcctcagcctcccaagtatctgggactacaggtgtgcaccaccatgcccggctaagttttgtatttttaatagagacggggttttgccacattggcaggctggtctcaaactcctgatgtcaagtgatccacccaccccacccacctctgcatcccaaagtgctgggattacaggaatgagctgccgtgcccagcctcccccctacccccctttttttctttcgagacagagattataggtgtgagccactggacccagcctgtttttattccttttaccaaatctccaaggaatatcttcccttccaagtgcgaatgtaaccttaagtcagttaacctctttgtgattacttttcttatctgcaaagtgacttaatgatcttaagtactttttttttttgagacagggtctcactgtcaccctggctggagtgcagtggcacgatctctgatctccactcactgcaatctcctcttccctggttcaagcggccctcccaccttagccttctgggtagctgggactacagatgtgaaccaccacgcccagctaatttttgtactttttgtagagatggggttttgccatgttgcccaggctgggattattaagtactttttatcatacagcaagattgacattttatattggaatacatttgtctctatataacggagattaacaggaaaatgacaagcctgggtgcggtggctcatgcctgtaatcccagcactttgggaggctgaggtgggaggatcacttgaggtcaggagttcgagaccagttttgccaagatgatgaaagcccatgtctactaaaaatacaaaaattagcccagcttgatggtgggcgcctataatcccagctatttgagagactgaggcaggagaatcacttgaacctgggcggcagaggttgcagtgagccgagatcatgccactgcactccagcctgggtggcatagcgagactcttgtctcaagagaaaacaaaacaaaacaaaaaaaaaacaggaaaatgacaaaaagtaatattacaactcagtgaattttataacaaacttttttggaattcattgactaatactataccaaatccaaaatactctctagtataccaaatccaactctaccctatagtataaattggattctatttggacttgtctcactaatccctcatacagtgtgttttattttttattgaagtaaaaaaatttgtcattttaaccatttttaagtatatagttcagtaatattaagtatgttcatgttgttgcgcaatagatcttcggaagtttttcgtcttgcaacctgaaactctacccattagcaaattcccatttctccttacacttagcccttggtaatcatcattcttttttttttttttttgagatggagttttactcttgttgcccaggctggagtgcaatggtgcaatctcgactcaccacaacctccgcctcccaggttcaagcaattctacctcagcctcccgagtagctgggattacagtcatgcaccaccacgcccggctaattttgtatttttagtagagaaggggtttctccatgttgaggctggtctcgaactcctgacctcaggtgatctgcccacctcggcctcccaaagtgctgggattacaggcgtgagccactgcgcctggcccattctttctaattctataaatttgactacttagttaccttacataaataaattcttatagttagtgttatttttgcttccatgccttttttgttgttgttcatgctcttacttggaatgcgttctattttgtctacctatgcacatcctgttgggttttttttttttttgggggttttttttgtttttttttgtttttttttcccagacaaggtctcaatttgttacccaggctggagtgcagcggcgccatctccactcactgcatcctcaacttcctgggcccaggtgatcctctcgcctcagcccctgcaggtagctgggactataggcatgtgccaccatgcccagctaaatttggtttttttgtttgtttgtttttgagacagagtctcactctgtcacccaggctggagtgcagtggcacaatctcagctcactgcaatctctgccgcccgggttcaagtgattctcctgcctcagcctcccaagcagctgggattacaggtgactgccaccacgccagctaagttttgtagttttagtagagatggggtttcaccttgttggccatgctggtctcgaactcctgacctcgtgatctgcctgcttctgcctcccaaagtgctggaattacaggcatgagccaccacgcccggccagaatttttgtatttttagtagacacaaggttcttaccctgttgcctaggctggtctggaagtcctggactcaagcaattcacctgccttggcctcccaaaatgctgggattacaagccaccatgcccggcctaaatcctgttgttttgttttgttttattttgttttgttttgttttgtttgttttttgagacagagtctcgctatgtctctcaggctgtagtgcagtggcgcgatcttggctcactgccacctctgcctcccaggttcaagtgattctcctgcctcagcctcccaagtagctgggattacaggcatgtgctactatgtccggctaatttttgtatttttagtagagacagggtttcaccatgttggccaggctggtctcgaactcctgacctcgtgatccacccacctcggccacccaaagtgctgggattacaggcgtgagtggtttttatttcttaggccggtttcctccatatgatcttgcagtagacattaatttctttcctttttaattaaaatactgtttgtatttcacattttgatgtttgttaagatttgttttatattgttttttgttttgtcttgtgtgatagtcttaaatccctagttagataataactggagagtaccatgtttctatatatctctcagtgacttgcacagtgctagcagatagtgctaaaaaattatttattattattattattttgttattgttgttgttgttgttagacagggtcttcctctgtcacccaggctagagggcaatgggatgatcatagcttactgcagcctccaacaactgggctcatgtaattctcctgcctcagcttcccaagtagctgggattacaggcatgagccaccatgtctggacaaaaatatttccaggtgcagtggctcatgcctgtaattcccacacttgggaggccgagcgaggctggaggatcacttgagcctaggagttcaagaccagcttggctaagatggcgagaccccgtccctacaaaaaattttaaaaactagccaggcatggtggcatgcacctatattcccaactactcagtgggctgaggtgggagggtcatttgaacacaggaatttgaggggagaaaaaaagaagagagaaagagaagtgaaggaaggaagaaaggaaggagggagggagagaagaaagaaacgaaagaaaggaaaagaaaaggaaggaaagaaaattggtaccaggaaagcaggaaagggaaatggaagtaaaaaaataataataataataaaatgaaaattggttagtcactattaacaatttgtatccttataatctggaaacattataatttcaaaagaaaaaatattctttggatcataggttctgaggtcagaacagcattcccgtagtctagatgaagtcaagttttatctgatcttaattgaaataaatatagctggccttgaacaaatctactcatggtatgtggataggaattaaattgtaggggcattcacttgatggcattcattcttagaacatttacctatgtctagcttttggagtaaagtcacataacctctaaccaggtaagtttcctgtggctttatttaggattttaaatactcattttcagtgtaattttgttatgtgtggattaagatgactcttggtactaacatacattttctgattaaacctatctgaacatgagttgtttttatttcttaccctttccagagcgatgattctgacatttgggatgatacagcactgataaaagcatatgataaagctgtggcttcatttaaggtatgaaatgcttgcttagtcgttttcttattttctcgttattcatttggaaaggaattgataacatacgataaagtgttaaagtacatgttattcagttttcattttgaagattagatggtagtatgagttagttaaatcaggtgatatcctcctttagaagttgatagcctatatatgtcatcctttgtggaggcaatttaaataaaatttaaaacatttattcctggctgggtatggtggctcactcctgtaatcccagcactttgagaggctgaggcgggtggatcacctgaggtcaggagtttgagaccagcctggccaacatggtgaaaccccgtctttactaaaaatacaaaaattagccaagcatggtggcacgtgcctgtaatcccagctgcttgggacactgaggcaggagaattgcttgaacctggggggcagaggttgcaatgattgcaccactgcactccagcctgggcgatagagtgagactccatctcagaaaacgaacaaacaatgtattccttttagtatttttacattgtatcaaactatggaagtcctctaattgagattaataagaaaaagacaatctgaattataattttaaacatttaacaagcatgtagtaaaataatgatgaagataaatagcattagtacagcaattaatatttgtagcatgctgacagtgctctgtgtgcgtttcatatattaaattactctaatcatcccaaatcctgtaagttgggtatcaattcaagtgttcctattgggtaggaatatacagttcttttaggaaatgtagtatggttctgtgtctcaaacaggacacttacacagttggccaacatcatcaccttctccattctctgagatgtttagtcttactgagcactaaatatgggtcatcaatagtccagactaccttgagcaaacaatagtccagactaccttgagcaaacagagcatatactcatacagtgtataaagagcaccaagcatacagatttcatgtctttctcatagttactcttgtaacatgagctaaagatcagacctctatgtcacctttgtaactgatttctagatttttttttttttttgagatggggtcttgccctgtcacccaggctggagtgtagtggcgtgatcatgcctcattggagccttcaactcatgagctcaaacaatcctcctacctcagcttcctgagtagttgggaccacaggtgtgtgccaccacacccagctcatttttgtattctttgtagagatgcagtctcaccctgttgcccacgctggcctggaactcctgagctcaaaagatccctccgccttgaccttccaaagtgctgggattacaagcatgaaccactgcacccggcctagatttttaaatgtgctttccagtatacactgaaactagaagtcgactaaagaattaccaagagaattctataaaatagagattgaaatggggctcgatgtgggatgggttggtgatattgcagggagaagtaatctgagtaaaggaggaaaagaactgatttgggaaaacgatagttttagtagtgagtttgagtatgaattaagttgagattgaatttgaattaagttgaggttgaatatgaattaagttgaggttgagtttgaggtatgaattaagatgtgaaattgatcattggaaatgttagattgagaaaagtcacagctggattaatagcttcagaagtgtgtttgcagacagttgcaactaaagtaataagaatagatggccttggccgggcgcggtggctcacgcctgtaatcccagtactttgggaggctgaggcgagcaaatcacgaggtcaggagttcaagaccagcctggcccacatggtgaaaccccgtctttattaaaaatacaaaaattagctgtgcacagtggtgcacgcctgtaatcccagctactcgggaggctgagacaggagaatcgcttgaacctgggaggtggaggttgcagtgagctgagatcagtgtgactgcactccagcccggtgacagagtgagactctgtgtaaaaaaataaaataaataaaataatggccgtaagcaagtaaagaaggatggccagctcttattgggaatgcctaaatctaaggcttgatcagaagtaatgaaaccgttggggccctacattgctatgacatccaaagggccatgaatatcaggaagaaagataattaacagggtctaatgttacagagaggttgagagcaaggagatttgattaaaagggtctttagagctgatgtcaggtgtatgatgcctttaagagcagtttttatagtgcagggggtggtcaaaagagaaaataggtgctttctgaggtgacggagccttgagactagcttatagtagtaactgggttatgtcgtgacttttattctgtgcaccaccctgtaacatgtacatttttattcctattttcgtagcatgctctaaagaatggtgacatttgtgaaacttcgggtaaaccaaaaaccacacctaaaagaaaacctgctaagaagaataaaagccaaaagaagaatactgcagcttccttacaacaggttattttaaaatgttgagatttaacttcaaaggatgtctcattagtccttatttaatagtgtaaaatgtctttaacttaagtgattagtacagtgtttctattgacatatacttatacaacttcaaaaacaactattaaattttctgttatttaggaacatgcatattagtcatgaaagtataaagaattagatgggaatgataaatgctaaaatcaggacatgtgttccatttgtgaatggaaggcagggagaaggtgccgtttggaaggagtacccaagagccgtaagctgaattggcagtgttttacatcttaagctgagagatagatttttttttcccctttttctttaaaaactctaaaactgttaattccaaggaacccagaagtctaggtagattatttctgctagttaaaagcagtagtcctgaaagctgaatattttggtgtcttttgagccaactttagtttcatcattaccaagggggaagagagctaacagttgatgagcacttgctctaggccagtccagagtgctgggcaccatacgcattttatctccctcccgctattcacaacaaatatgggaggtagtttatattatagccatctaataagatggggaaactaagactcaaagagattcagaaacttgtccatgattataaatgtaagagagttggaattcagatttatgtatttagaccccaagcctttctcattacatcattttgccttccaaatctctaccctctatccttcacctccccactgatcaaaacgagatgatagtttgccctcttcaaaagaaatgtgtgcatgtatatatctttgatttcttttgtagtggaaagttggggacaaatgttctgccatttggtcagaagacggttgcatttacccagctaccattgcttcaattgattttaagagagaaacctgtgttgtggtttacactggatatggaaatagagaggagcaaaatctgtccgatctactttccccaatctgtgaagtagctaataatatagaacaaaatgctcaagaggtaaggatacaaaaaaaaaaaaattcaatttctggaagcagagactagatgagaaactgttaaacagtatacacagttgtcagtttgatccaccgaggcattaattttttcttaatcacacccttataacaaaaacctgcatattttttctttttaaagaatgaaaatgaaagccaagtttcaacagatgaaagtgagaactccaggtctcctggaaataaatcagataacatcaagcccaaatctgctccatggaactcttttctccctccaccaccccccatgccagggccaagactgggaccaggaaaggtaaaccttctatgaaagttttccagaaaatagttaatgtcgggacatttaacctctctgttaactaatttgtagctctcccatgaaacttttgtagcttaaatacacaagaattttttgaaaaggaaataagataatgatgcaaaatagttaattttttaaaaaaatgttagacactgcagtggatgcaacaaaatactttatatgaaagatttatccagttaacttttgtggagtattaggtattagactaataattagcacacttacttaagttagaaagtataataatgcgccggacgcggtagctcacgcctgtaatcccagcactttgggaggccaaggtgggcggatcacaaggtcaggagatcgagaccatcctggctaacacggtgaaaccccatctctactgaaaatacaaaaaaatttgccgggcgtgatggcgggcacctgtagtcccagctactcgggaggctgaggcaggaggatggtgtgaaccccggaggcagagcttgcagtgagtcaagatcgtgccactgcactccaacctgggcgacagaatgagactccatctcaaacaaaaaaacaaaacaaaacaaaaaaaagtgtaataataatttatcattagctggatgatatgctgttgtttcccatgtcacctgtataagatatgtaaaataagaacacattatttacatctaatatagataaaatcctgaggcgctctcagattgttttgtagagttcaaatgtaaatattgttttcatttatggtccttttggttataagtaacagaaatcaactctaaaaagatttttattataggttagattatgtcatggaaccttaaggcttgtccctttctagttcttttgtgtaaagcggtgatttcttccatggagggaatggtatttaggcaattttttttttttttcgagatggagtcttgctctgtcgctcaggctggagtgcagtggcaccatttcagctcactgcaacttccacctcctgggttcaagtgattctcctgcttcagcctcccaagtagctgagattacaggcacccgccaccacacccggcttattttgtatttttagtagagatggggtttcaccatgttggccaggctggtcttgaactcctgacctcaagtgatctccccaccttggccttccaaagtgctaggattacaggcgcctagcctaggcagtcattttcaaaaaacaagcatgactcaccaaaagttttaagattttctgtgataatgttcttattgaggcttacattatattacagtttcttgaatctaaaatgatgtaccctcttaggatatatacatcatgcttcattggtctcagggggctgatttttataaggagagatttgctagttttcacaatatgtcctctaagttggcatgtatagctaaacaggctttcataaaaatatacaatttagttaatgaaatttgggatatagtcttttatgattgaaataattttgctaaatagactgtctctgatttattaggtaatcaccactcttattttgttttacttccttaatgtctacatagaaaggaaatgagaaaaatccagaggttgtcatttgacttatgagtctgtttgacttcaggatttggtacatgaaatttcacttaatctttttgatatgtataaaacaaatattctgggtaattatttttatccttttggttttgagtcctttttattcctatcatattgaaattggtaagttaattttcctttgaaatattccttatagccaggtctaaaattcaatggcccaccaccgccaccgccaccaccaccaccccacttactatcatgctggctgcctccatttccttctggaccaccagtaagtaaaaaagagtataggttagattttgctttcacatacaatttgataattagcagaatagaggattgtaaaatgtcattgtagaacatcccttgggccagattctaatgggtagaaatttgaactaaacctctgggttttgtttgtttttaatgcctttctgttacccagatgcagtgctcttgtagtcccaagtctaagctctaggttgccttctttcctggcagaagttggtgtctatgccataaggaggtagttcctgttagaagggatttaattataccttatataaggaattagtgtttgcccttctaggtatagttggatgttagcttctgatgtaaactggatttctttttctttctctctctttttttttttttgttttggaggcagagttttgcccttgtaccccaggctggagtgcagtggtgtgatctcagctcacagcaacctccgcctcctgggttcaagcaattctgcctcggcctcccaagtagctgggattacaggcgactgccaccacacccggctaatttttgttttattagtagagatggggtttcaccatgttggccagactgatcttgaactcctgacctcaggtgatccacccgccttggcctcccaaagcgctgggattacaggcgtgagctgccgcacccagctgtaaactggatttctaatggtagatttttaggtattaacaatagataaaaagatactttttggcatactgtgtattgggatggggttagaacaggtgttctacccaagacatttacttaaaatcgccctcgaaatgctatgtgagctgtgtgtgtgtgtgtgtgtgtgtgtgtgtattaaggaaaagcatgaaagtatttatgcttgattttttttttttactcatagcttcatagtggaacagatacatagtctaaatcaaaatgtttaaactttttatgtcacttgctgtcttttcgtcctcgttaaatttaattttgttggtcttttgttgttattggttggttttctccaaatgctagctatgttaagaaatttaaggccaggtacagtggctcatgcctgtaatcccggcattttagaaggctgaggcaggaggatcacttgagctcaggagtttgagaccagtctgggcaacatagcaagacctcgtctttgtttaggggaaaaaaaagaaatttaagtaggagattatataagcaaaaatacaattaatttccagcattcactatataatataaatctccagactttacttttttgtttactggatataaacaatatctttttctgtctccagataattcccccaccacctcccatatgtccagattctcttgatgatgctgatgctttgggaagtatgttaatttcatggtacatgagtggctatcatactggctattatatggtaagtaatcactcagcatcttttcctgacaatttttttgtagttatgtgactttgttttgtaaatttataaaatactacttgcttctctctttatattactaaaaaataaaaataaaaaaatacaactgtctgaggcttaaattactcttgcattgtccctaagtataattttagttaattttaaaaagctttcatgctattgttagattattttgattatacacttttgaattgaaattatactttttctaaataatgttttaatctctgatttgaaattgattgtagggaatggaaaagatgggataatttttcataaatgaaaaatgaaattcttttttttttttttttttttttgagacggagtcttgctctgttgcccaggctggagtgcaatggcgtgatcttggctcacagcaagctctgccttctggattcacgccattctcctgcctcagcctcagaggtagctgggactacaggtgcctgccaccacgcctgtctaattttttgtatttttttgtaaagacagggtttcactgtgttagccaggatggtctcaatctcctgaccccgtgatccacccgcctcggccttccaagagaaatgaaatttttttaatgcacaaagatctggggtaatgtgtaccacattgaaccttggggagtatggcttcaaacttgtcactttatacgttagtctcctacggacatgttctattgtattttagtcagaacatttaaaattattttattttattttattttttttttttttttgagacggagtctcgctctgtcacccaggctggagtacagtggcgcagtctcggctcactgcaagctccgcctcccgggttcacgccattctcctgcctcagcctctccgagtagctgggactacaggcgcccgccaccacgcccggctaatttttttttatttttagtagagacggggtttcaccgtggtctcaatctcctgacctcgtgatccacccgcctcggcctcccaaagtgctgggattacaagcgtgagccaccgcgcccggcctaaaattatttttaaaagtaagctcttgtgccctgctaaaattatgatgtgatattgtaggcacttgtatttttagtaaattaatatagaagaaacaactgacttaaaggtgtatgtttttaaatgtatcatctgtgtgtgcccccattaatattcttatttaaaagttaaggccagacatggtggcttacaactgtaatcccaacagtttgtgaggccgaggcaggcagatcacttgaggtcaggagtttgagaccagcctggccaacatgatgaaaccttgtctctactaaaaataccaaaaaaaatttagccaggcatggtggcacatgcctgtaatccgagctacttgggaggctgtggcaggaaaattgctttaatctgggaggcagaggttgcagtgagttgagattgtgccactgcactccacccttggtgacagagtgagattccatctcaaaaaaagaaaaaggcctggcacggtggctcacacctataatcccagtactttgggaggtagaggcaggtggatcacttgaggttaggagttcaggaccagcctggccaacatggtgactactccatttctactaaatacacaaaacttagcccagtggcgggcagttgtaatcccagctacttgagaggttgaggcaggagaatcacttgaacctgggaggcagaggttgcagtgagccgagatcacaccgctgcactctagcctggccaacagagtgagaatttgcggagggaaaaaaaagtcacgcttcagttgttgtagtataaccttggtatattgtatgtatcatgaattcctcattttaatgaccaaaaagtaataaatcaacagcttgtaatttgttttgagatcagttatctgactgtaacactgtaggcttttgtgttttttaaattatgaaatatttgaaaaaaatacataatgtatatataaagtattggtataatttatgttctaaataactttcttgagaaataattcacatggtgtgcagtttacctttgaaagtatacaagttggctgggcacaatggctcacgcctgtaatcccagcactttgggaggccaaggcaggtggatcacgaggtcaggagatcgagaccatcctggctaacatggtgaaaccccgtctctactaaaagtacaaaaacaaattagccgggcatgttggcgggcaccttttgtcccagctgctcgggaggctgaggcaggagagtggcgtgaacccaggaggtggagcttgcagtgagccgagattgtgccagtgcactccagcctgggcgacagagcgagactctgtctcaaaaaataaaataaaaaagaaagtatacaagtcagtggttttggttttcagttatgcaaccatcactacaatttaagaacattttcatcaccccaaaaagaaaccctgttaccttcattttccccagccctaggcagtcagtacactttctgtctctatgaatttgtctattttagatattatatataaacggaattatacgatatgtggtcttttgtgtctggcttctttcacttagcatgctattttcaagattcatccatgctgtagaatgcaccagtactgcattccttcttattgctgaatattctgttgtttggttatatcacattttatccattcatcagttcatggacatttaggttgtttttatttttgggctataatgaataatgttgctatgaacattcgtttgtgttctttttgtttttttggttttttgggttttttttgttttgtttttgtttttgagacagtcttgctctgtctcctaagctggagtgcagtggcatgatcttggcttactgcaagctctgcctcccgggttcacaccattctcctgcctcagcccgacaagtagctgggactacaggcgtgtgccaccatgcacggctaattttttgtatttttagtagagatggggtttcaccgtgttagccaggatggtctcgatctcctgacctcgtgatctgcctgcctaggcctcccaaagtgctgggattacaggcgtgagccactgcacctggccttaagtgtttttaatacgtcattgccttaagctaacaattcttaacctttgttctactgaagccacgtggttgagataggctctgagtctagcttttaacctctatctttttgtcttagaaatctaagcagaatgcaaatgactaagaataatgttgttgaaataacataaaataggttataactttgatactcattagtaacaaatctttcaatacatcttacggtctgttaggtgtagattagtaatgaagtgggaagccactgcaagctagtatacatgtagggaaagatagaaagcattgaagccagaagagagacagaggacatttgggctagatctgacaagaaaaacaaatgttttagtattaatttttgactttaaattttttttttatttagtgaatactggtgtttaatggtctcattttaataagtatgacacaggtagtttaaggtcatatattttatttgatgaaaataaggtataggccgggcacggtggctcacacctgtaatcccagcactttgggaggccgaggcaggcggatcacctgaggtcgggagttagagactagcctcaacatggagaaaccccgtctctactaaaaaaaatacaaaattaggcgggcgtggtggtgcatgcctgtaatcccagctactcaggaggctgaggcaggagaattgcttgaacctgggaggtggaggttgcggtgagccgagatcacctcattgcactccagcctgggcaataagagcaaaactccatctcaaaaaaaaaaaaataaggtataagcgggctcaggaacatcattggacatactgaaagaagaaaaatcagctgggcgcagtggctcacgccggtaatcccaacactttgggaggccaaggcgggtgaatcacctgaagtcgggagttccagatcagcctgaccaacatggagaaaccctgtctctactaaaaatacaaaactagccgggcatggtggcgcatgcctgtaatcccagctacttgggaggctgaggcaggagagttgcttgaactgagaaggcggaggttgcggtgagccaagattgcaccattgcactccagcctgggcaacaagagcgaaactccgtctcaaaaaaaaaaggaagaaaaatatttttttaaattaattagtttatttattttttaagatggagttttgccctgtcgcccaggctggggtgcaatggtgcaatctcggctcactgcaacctccgcctcctgggttcaagtgattctcctgcctcagcttcccgagtagctgtgattacagccatatgccaccacgcccagccagttttgtgttttgttttgttttttgttttttttttttgagagggtgtcttgctctgtcccccaagctggagtgcagcggcgcgatcttggctcactgcaagctctgcctcccaggttcacaccattctcttgcctcagcctcccgagtagctgggactacaggtgcccgccaccacacccggctaatttttttgtgtttttagtagagatggggtttcactgtgttagccaggatggtctcgatctcctgaccttttgatccacccgcctcagcctccccaagtgctgggattataggcgtgagccactgtgcccggcctagtcttgtatttttagtagagtcggggtttctccatgttggtcaggctgttctccaaatccgacctcaggtgatccgcccgccttggcctccaaaagtgcaaggcattacaggcatgagccactgtgaccggcaatgtttttaaattttttaaatttaaattttattttttagagaccaggtctcactctattgctcaggctggagtgcaagggcacattcacagctcactgcagccttgacctccagggctcaagcagtcctctcacctcagtttcccgagtagctgggactacagtgataatgccactgcacctggctaatttttatttttatttatttatttttttttgagacagagtcttgctctgtcacccaggctggagtgcagtggtgtaaatctcagctcactgcagcctccgcctcctgggttcaagtgattctcctgcctcagcctcccaagtagctgggattagaggtccccaccaccatgcctggctaattttttgtactttcagtagaaatggggttttgccatgttggccaggctgttctcgaactcctgagctcaggtgatccaactgtctcggcctcccaaagtgctgggattacaggcgtgagccactgtgcctagcctgagccaccacgccggcctaatttttaaattttttgtagagacagggtctcattatgttgcccagggtggtgtcaagctccaggtctcaagtgatccccctacctccgcctcccaaagttgtgggattgtaggcatgagccactgcaagaaaaccttaactgcagcctaataattgttttctttgggataacttttaaagtacattaaaagactatcaacttaatttctgatcatattttgttgaataaaataagtaaaatgtcttgtgaaacaaaatgctttttaacatccatataaagctatctatatatagctatctatgtctatatagctattttttttaacttcctttattttccttacagggtttcagacaaaatcaaaaagaaggaaggtgctcacattccttaaattaaggagtaagtctgccagcattatgaaagtgaatcttacttttgtaaaactttatggtttgtggaaaacaaatgtttttgaacatttaaaaagttcagatgttaaaaagttgaaaggttaatgtaaaacaatcaatattaaagaattttgatgccaaaactattagataaaaggttaatctacatccctactagaattctcatacttaactggttggttatgtggaagaaacatactttcacaataaagagctttaggatatgatgccattttatatcactagtaggcagaccagcagacttttttttattgtgatatgggataacctaggcatactgcactgtacactctgacatatgaagtgctctagtcaagtttaactggtgtccacagaggacatggtttaactggaattcgtcaagcctctggttctaatttctcatttgcaggaaatgctggcatagagcagcactaaatgacaccactaaagaaacgatcagacagatctggaatgtgaagcgttatagaagataactggcctcatttcttcaaaatatcaagtgttgggaaagaaaaaaggaagtggaatgggtaactcttcttgattaaaagttatgtaataaccaaatgcaatgtgaaatattttactggactctattttgaaaaaccatctgtaaaagactggggtgggggtgggaggccagcacggtggtgaggcagttgagaaaatttgaatgtggattagattttgaatgatattggataattattggtaattttatgagctgtgagaagggtgttgtagtttataaaagactgtcttaatttgcatacttaagcatttaggaatgaagtgttagagtgtcttaaaatgtttcaaatggtttaacaaaatgtatgtgaggcgtatgtggcaaaatgttacagaatctaactggtggacatggctgttcattgtactgtttttttctatcttctatatgtttaaaagtatataataaaaatatttaatttttttttaaattagctgtatctgtgattgtatttcttttttgcatattattttgccctttggcccatattttgatatggatgccaccatagcattttgtgtatgtgcatgtgtattcccacttaatgtcacatttttcatgtctttacatattcttatttttgtttgtttttgagacagagtctcgctctgctgcccacgctggagtgcagtggtgcaatctcagctcactgcaacctgtgctatccgggttcaagcggttctcgtgcctcagccacgtgagtagttgggattacaggcatgtggcaccatgccccactaagttttgtatttttagtagagatggagtttcaccatgttggccaggctggtctcaaactcctgccctcaagtgattcgaccaccctggcctcccaaagtgctgggattacagccgtgagccaccgcacacggcctctctatttatttctatacatagcttttcacattatattatgtttatatattgtttatatctgtatttcctctttcattagagaaaaggtagtacatcttattcttcatggtgtctacaatatctggcagtttttggaagtcaagcgtgagcttagagcatagactggtgggattgtcaaagaagagggcaactggaagagaactgtcagttatttttggatcagtctttaattcatcatgacgggttaggcattagttgtatttcttgctaattttgaagaagacttattaacaaatcctacattaggtaaatggttttgaaagttgagttaatcataatggtgtttgacctaggactatttttaggccctatttatcttaatatcgaataatgaagcagcttcccccttagatatagacagaaaacatcaaagccaccacactacctggctggatttatcctagtaataaaatcaaaactgagctagttctctggctttcattgtaataattgtccttgtggttgtaaggaatctagatgaaaattacatggtctgttctacagccacagctgtacctacattcagaagacagacaaaagttgctgtgtttgaagagatccttcattaagggatcagacagagattactttgagacatattctaagtttaacttttctgcagggttgccattaacagaaataaactacagagttaatttctttttgtttttgatacagtctaactctcacccaagctggagtgcagtggcgcaatttcagctcactgcaacctctgcctcccaggttcaagcaattctcctgcctcagcctcccgagcagctgggactacaggcatgtgccactatgcctggctaatttttgtatttttagtagtagagacgtggtttcgccacgttggccaggctggtctggaactcctgaccccaggtaatccacctgcctcggcctcccaaagtgctgggattacaagcttgagccactacgcctgacccagagttaactttttaaaaaagtttttatgaacttaagtcttgtgatgtttgaaataatggattcaatttagacatcaaattccagaagttactaagagcagctgggcgcggcagctcacacctgtaatcccagcactttgggaggccgaggcgggtggatcacctgagatcaggagttccagaccagcctggccaacatagtaaaaccctgtctctactaaaaatacaaaaattagcccggcatggtggcacgcgcctgtagtcccagctacttgggaggctgaggcaggagaattgcttgaacccgggaggtggaggttgtggtgagccgagattgtgccactgtactcaagcctgggctaaaaagcgagactccgtctcaaaaaaaaaaaaaaaaaaaaaaaaaaaaaaaaaaaaaaaaaaaaaaaaaacaaaacacgttactaagagcaactctgggccaggcacggtggcttacacctgtaatcccagcattttgggaggacgagacaggcggatcacttgagcccaggagttcaag

SEQ ID NO: 777 - DNA, 38224 bp, Homo sapiens
ataaataaataaataaactgttcagtggcttttaacatatattcagggttgtccaccaatccccatcgtgtaattttagaacatcttcatcaccccaataagaaaacttgttcccatttgtagttattccctcactctcctcctcaacctcctaccctaggcaagcactactttctgtttctatagacttgcctaccttggacatttcatatatgtggaatcacataatatgtggtcttttgtgactggcttctttcatttaatatggtttctaaaaacttgtttttgttttttgagacagggtctccctctttgccccaggctggagtgcagtggcgagatcatagctcaccacagcctcaagctctggggtttgcaatccttccacctcagcttcctgagtagctggggctacaggtgtgcactactatgcccaactaattaattttgttttttttttgtagagacagggatctctttatgttgcccaggttggtctcaaactcttggcctcaagcaatcctccagcctcagcctcccaaagtgctgggattacagatgtgagcaactgcaccaggccttaatttaatatatattttttgagacagagtctcactctgtcgcccaggcttgagtgcagtggcaggatcccggctcactgcaacctttacctcccaggttcaagtaattctcctgcctcagcctcccaagtagttgggactacaggcgtgcaccaccacacctggctaatttttgtattttaatagagacagggggctgggcttggtggctcacgcctgtgatcccagcactttggaaggccgaggcgggtggatcacctgaggtcaggagttcaagaccagcctggccaacatggcgaaaccccgtctctactaaaaatacaaaaattagctgggcgtggtggcgcgcacctacaatcccagctaatgaggagactgaggcaggagaatcgcttgaacccaggaggtggaggttgcagtgaggcaagattgtgccactgcactccagcctgggcaacagcaagactccatctcaaaaataaaaaaataaaaaatagagacaggatttcaccatgttggccaggctggtcttgaactcctgacctcaagtgatctgcccatctcagcctcccaaagggttgggattacaggcatgagccactgtccctggccttaatatgtttttgagattcattcatgttgtggcacacagcagtacttcattgctttttgtggttgaataatatattgtattgtatagaaatagcacattctgcttatccatcatcagctgatgaacatttgggttgttgcaatattttggctattgtgagtagtgctgctatggacatttgtgtacaaatgtttatgtagacatgttttcagttctgttgggtagattcctaggagtagaatcgctgggtcatagggtaactctatgtttaactttcttttttttttgaggagtctcgcactgtcactcaggctggagtgtaatggcacgatcttggctcaccgcaacctctgcctcccaggttcaagcaattctcctgcttcagcctcccgagtggccgggattacaggcatgtgccaccatgcccagctaatttttatttttatttatttatttagtttgagatggaggttcactctttttgcccaggctggagtgcaatggcatgctctcagctcactgcaacctccgcctcctgggtttaagtgattctcctgcctcagcctcccgagtggctaggactacaggctcacgccaccacgcccagctaatgtttgtatttttagtagggacagggtttcatcatgttggccaggctggtctcaaactcctgacctcgtgatccacccgccgcggcctccctaagtgctagggttacaggggtgaaccaccacgcatggctgttgagcattttttcatgtgcttattggccagtgtatattttctctggagaaacgtctgttcaaattctttgcccagaccaggaaaggtggctcagcctgtaatcccaacactttgagaggctgaggtgggtggatcgcttgaccccaggagttcgagagcagcctgggcaacatgccaaaaccccatctctactaacaatacaaaaaattagctgggtgtggtgtgtgcctgtagtcccagctacttgggaggctgaagtagaaggatcacctgagcctgaagagattgaggctgcagtaagccatgatcgtgccactgcactccagcctgagcaacacagtgagatcccccatctcaaaaaaaaaaaaaaaaaagtaaaataaatttctctttgcttgtggctcctttaggtcctggctgactgtcattttcctgggcctctcttgcttcctgaagacttttctcttcccttttctacatcccagtctaaccccagctcctctttcctttctcatgtggggcagtgactcctttgacttgtcttcactagacaccttcccccattttcaacaagttggcccaggaagtttccctgagccccttccgcagagtgaggaagcacggctgtcatttttcttttctatctttaatttaaaaattgtttttattttttgagggaagagtcttgctatgtgggtcagcctggagtgcagtggcacaatcctagctcactgcagccttgaagtcctgggctcaagcaatcctcctgcctcagccttccaagttgttgggactacaggcacacactaccaggcctggctactttttaattttttgtagaaacagggcctcactatgttacccaagctggtctcaaactcctggcctcaagcaatcttctttcctcagcctcctaaagtgttggggttataggcatgagccaccacacccagcctgttgttttcttttcaaaatcataattattttcttccttatttacattttagtgtgacgattgttccagggctgcagtctcctcttgtggaaaataagggaaccagactactccatctctaaggctcctaccaggtctaacatactatggaaacttataagtccatctgaatgactaaatgcaggatttacatttggtagagcctgattagagaggaaaagaaaagatggggaaagtttcctttttttcttgcttcacaggtttgcccacagcccagctgcatctgtgaacatgaatgctacttctacagaaacagagtggaatctccgaaatacctttgagaccctttcgtgtcaggtgggtgggccacagcctgatcatggaataaaagtcagccttaaggattcagatttcaataactttcagtgaaccccaccttgagtcaggcactttgctaggtgcttttaaacacactatcccatttaatcacaatgggaggaaggttttattgcctcaatttttttttttttaagacaaagagtctcactctgtcatccaggctggagtgcagagtttgatctcggctcactgcaacctccacctcccaggttcaagtgattctcctgcctcagcctcctgagtagctgggattacaggcacccactaccacgcctggctaatttttgtatttttagtagtgacagggtttcaccatgtgggccaggctggtctcaaactcctgacctcaagtgatccgcctgccttggcctcccagagtgctgggattacaggcgtgagccagcgtgtccagccaattgcctcaattttaaggatgaggaaaatggtgctcaccgagaggccaggtagctagctacttcaaagtcacacagccactgaggagcagagccatgaggactcgactgtcccttgggaagacgagttattaaaaaaaaaacaaacacccaccaaagcagcaaactccatgcctacaggggctgggcaagtaaaaataaggagatgggcaggcatgagaaaacaggagcagtgggaaggacttgcctattctctgaccttggcagctgctgaccagcagcaggtcatgccatgcagcagtgtgggtgtcatgtggctgattttctagtatctcaactgatgggggagagccagagtttgcatgaaattatcccaatttttaaagaaggagccaacagtgagccaaacacgataccactacagaacaaatctggtctaggggactgctattgaggatgaattcctttggcttaacacccatcctcctgttcattcatcttctcaaaagcaaacatgctctaagtgaggagggaggtcaccttcagccataaggcgccattctactggcgagaagtggtggggaatgtgggacagagaagactttgtagctggggaagaaattaagtcatagtcaccaaggatttggccctgccttcaccggtttccctgggcggcagggagggccctaccatagaatgttaccgacaagtgggagcaaatgggggccccggccctgttcgttcagctgggtgaaaacgagggtcttgggggcacaggtttaggtgggattggtgggggatagtagctttctttttcaattgttgaacacagaagagaaacccaaagcaaggcgccaatcattaaaacacacaaacacagacacacgcgcaagtcaccttgctcgctgggtactttagttacctcaaacggaaatggggttttcggcccctcttttcctgcctacctcatgggactgttgccaaagaggaaggaaccggaaggaaaggtcttgggacaggacaggggctaagcagccgtgcattcgttatgatgtgaggggtgccgggggctggagactgaggtcggggagagcacgggccctgggtccttagtgccagcgggcggccagaaccagagtgcgggggtctagggattcggggacccagacgcaccaggcccacatatcccgctcagaagggtgcggaaagccgcgcgcacacggcagggacacgccccagacacgccccgccccgcacttctggggcgcgacccggaagcggaagggaacccgtttcttttccttccccagtgcgtctttcctgcgtcgttccggcgcggcgggagcagagatctgcggccgtttgcagcttgcggtagggaggcgtggtggtctgaagcctccgagcagccgcggccatggcggatgtaaccgcccgtagtctgcaatacgagtacaaggcggtgcgtttggtcttggggaaggattccaggctcaggagtccaatggggagggggaggctgaaaaagggagtttcagtctgaaggcctacaggagagccacgaaaacgaaggggaaatggaatcggggtgaaggtgggggttatacgatgacgtgaataacctactggggtctggggagcgctaagatctctctaggaggagtttctcgagtaccttcaacgctaagccctcccccttccacacgtcactcccaacccactcactacttttcacaggtgtgggttatgatgggcgctgttaggaacaagaattgtttagctgattcgacagcgcataagacttattcagctgtacgcttctgcacagcgttatactatgcaattcttaaggaaaatatatttttattacgattagtgatgataagcaactagttactacgattttttccatcagctggggtaactatgatagtaggaattggccctgctcatgtcaaagcttcaataatgttttgatcttttcagaactcgaatcttgtgctccaagctgaccgttctctcattgaccggacccgccgggatgaacccacaggagaggtgctgtcccttgttgggaagctggagggcacccgtatgggagacaaggctcaacggaccaaaccgcagatgcaggaggaaagaagagccaagtgagtgccaaggggatactattttttccttcagatccaaagtctcttccctttaacattcgagcagcatttttgctggaatgcttggtgtaagatcagtggcattaaaacaattcagtgaaggtaaaaacagaccaggagagtttaaagattttttggccttaacaagtgcatctcaagtggaaaataacttgttggtacctttttcttacatgtgtgtttctggtccatagacagatcttaattttcttcagggtattttcaagacccttgctattcctatgtcccagtaattcgttttccttttttcccattactaacttcctacccctactttttccatttactcttgtccacgttctacctattttgttgtaacaaactaatttaagcatccatagtatgaaagacaggtttctttcttagtttgcatttttttcctttattttttttttttaagatttcttggggatatgtttcaaaaacttacctttacctcatcattatcttttgatcctgaatatcttggtgtcttgctccctttcctatgatgaagtttccaaaattcctaggcttagtttgattaaagtagttatgtttgaaatgagttaatacattatctccactttgtgctatatcttcttttccagttttgttatactttgttgatagtcaacggcagtagattctgttagagcttggttctctagctagaaagggaaaatgcattggagaggtgaaaaactagtcaaaatcctattatataatagtctcatacaatgtatgaagggttgtactttttttttttttttttttgagacggaatctcactctgtcacccaggctggagtgcagtggcgtgatctctctcacggcaacctccacctcccgggttcaagcgattctcctgcctcagcctcctgagtagctgggattacaggcgctcgccactgtgcccggctaatttttgtatatttagtagatacagggtttctccatgttggccaggttggtcttgaactcctgacctcaggtgatccgcctgccttggcctcccaaaatgttgggattacaggcgtgaaccactgcacctggccaaagggttgtattttttaaatgagaaacatctcattgtaatgtttagtgcatctagtgagaagatgatagggaatttttctttttgtcactgtgtcccataaagaaatactcctgcaagtgattaaggccaaacggaatcatttgctgaggctcagatacctgttttcagatattaacttcttgccatgaagctgaggagaggagggtgggcttgatccagtcttcccttggggacgaaaggttctgccattcaatatcacattgcatgtccattaggcgaagaaagcgtgatgaggaccggcatgacatcaacaagatgaagggttatactctgctgtcggagggcattgatgagatggtgggcatcatctacaagcccaaaactaaagagactcgggagacctatgaggtgctactcagcttcatccaggctgctcttggggaccaggtgagtgtgatattgtgaaatatatattaggtctttatttcattttctggcatacagcttctaagatccttggaatcttcgaagtgctaagtatctttttgtatgctgatgagttgactgatggctggcagcacttaggtagttcagaatggaggctggtcatttaatcaatcatgcctacataatgaagcctccataaaaaccccaaaaggactaggtttagagagtttgtggatagctgcacacatggaggtttctggagggtggtgcgcctgagagggcctggtagcgccacacccattcccacatgcctgccctgtgtacctcttccatctgttgtcttttggtaggcatcttttgtaatatgccttatagtaaaaataagtgtttccctgatctgctctagaaaattagttgaaccccaaaaggggattgtggaaacctcgatttatagctgtatagtgagaagcacaggtcaaacaacctgtgcttgtgactggcatcatgaagtgggaggcaggcttgtgcgactgagtcctcagtctgtgggatctgacgctatctccaggtagttagtgttggaacggaattgaatttgaggacccccagcttgtgtccactgcacaatttttggattggttgctggtggggaggaattgtcacagaagccttctgtgttaattgttgtgagagtatagaaaaaaacaagtttgctttatttcagtattctcagagtgaggtggccagaggatgagaccatgtgtcagaaagggagagggtcacagctgggagactgaaccttttctctggatcctcttgtgggctgtactggttggcagaagtggcttatatttactgagcactcgatttgtgtggaacagcacgtgtcttcccccaaccctacataactccatgaataggtgctgttaatattcattttccattttatagaagagagatgtgaggcaagaatagttaagtaattttcccgagtcacagaagtagtatttggcagagccaagatatgatccagatagtttatctctagaatccatgttcctaaccattacacatgtgtgattagattggggaccattatgagtctgaggagctctgttgaggtgggtgctagaggaagtgaggacaaagaattacaaaagtgtggcaagctagaggaggtctgccaagtgactaccacctggagtgtggcaagctgttgtggaagctgtgtcctgctgcttgaggccacctagctaatctttttaaaaacagacaagtcttcctttagttgtggcatcagcattaatgagaaaggtcagagcctagtatgtggcaggttttgaagaggtgtggctcttcacatcctgccgccacatacacctggttgaagatgttttgcctgtcgtcgttctcaatattggttggttgtttcttgccaccagccacgtgatatcctttgtggggcagctgatgaagttctagctgttctaaagaatgaaaagctgcgggacaaggaaaggcgaaaggagattgacctgctgctgggtcaaacagatgataccagataccatgtgctagtgaacctgggcaaaaagatcacagactatggtggagataaggaaatccaaaatatgggtaagtgcgcgctttatgttctgatcatgttcattggttgttgttgacccctaaacatgcatcttctagcatcattcatttaaaaaccttaatgtcagtgagttcccataatctgttctgtgttttttgaagagttacaattgatggacaccagaatccctagattccagcagctgttccttactctgagacccttttattgtgtggaatatgagaaaatgtgggcagagccttgggggctcaagtggttgagcaagcagagctgggctgactccaaggctggcaggtggagaaggtcttggcaggagcagcataggtggctctctcatgttgatcatctaagtatctgtatgtgtccttagcacttagatctttcctgaggagaggtagtcggggaggacattggctccagagtgccttgttttactagccattcactgccctctttttctaatccttcattgtttcagatgacaacattgatgagacatacggtgtgaatgtgcagtttgagtctgatgaggaggtgagtgataaacatacccagtccattcttgtttttgacgttgattaaggtaaagggaccccttctagtgtaaacaagctctctagtttaaaccagataaattttatggtgttgtatgggtttcagacttgggcattatatgttcttttgcttaaaaaaaagtgcagttatcttttaactttgctaccgcaaatttaaactaacaaatgtaaagcaatataatttttttttttttgagacggagtcttctctgtcgcccaggctggagtgcagtggtgcgatctcggctcactgcaagctctgcctcccaggtttcgcgccattctcctgcctcagcctcccgagcagctgggactataggcgcccgccaccatgcccggctaattttttatatttttagtggagacggggtttcaccgtgttagccaaggtggtcttgatctcctgacctcaggtgatccgccccccgtcggcctcccaaagtgctgggattacgggtgtgagccactgcgcccggccacaatataattatttaaaatataccaagtggatcagcaaaaagaaagaaaaaagttaaagtacagtgtatactttcattgagaatgtatctgctatgttttactgcattttaaccttattacagtattttcccatttttcattactgtatctgactaaaagattgcacatttgccctagagcacagacatagtttgtacatggttaagtcactggggttaatgtttactgtctaatagaattccttgaatataactaaataggaataagtggggtactttgagaaaattacagtgccttagagttctcagtgagtagaagtggctcctgaaagggaaaatggagccccggtatatataccaaggctggaagaaggggtcgcacggggagagtcagaggactaggagccaagacttctgagtttgagtcctgtatcttggcaggtcatcttgcttcagtttctccttctataaaatgaggccatttcaataggtgattgctaagcctcttcctacagtatagttaataggatttgatgattttaagtagcaacaaactgctttgcttttagcagttcattcatttaacagtgctcattattgaagtacctgttttgactgtgacactatgccaggtacgcctaatgtgcagtgtatgagtaaatagagtggtgagcaggctaagtgcgatctcttcattccggagtcaccacctgctttcccaggcatgcctctgtatagctcttttctccttagctgatcactgtttttgagtgttgattgtgtgtgtattagagagaggctatgatccagttgattgccattgtagcagcctaaggtgagaaatagaaagtagatatatctaataagtcgtgctaagcagtcattctatgtccactggaataaggctgaccttggttccaataggctctcggtttcaccccaaagccatttctctacccattgagctaatttagggtgacttgagggagaggttctgtggtgatgcaggatcagctccagatcatggttgagttggggtcatttccacaggaaggtgatgaagacgtatacggggaggttcgagaagaggcatctgatgatgacatggaaggggacgaggctgtcgtgcgctgcaccctctcggctaatgtaagttcagtttgctcttcctcattgctacaaggttacttctgggtgttagtgcttcttccccatgcctaggtcctgttacatttattgagccactttttgctggagtgaactataataaacacttagtgtctagagtttcttaaaatttctgtcggttttcttccttcccaaagatgtatgttgatgaaatcttagtctggtgtgcttctgaactcaatattccagagttttttcctctggaaagtcctcacaagaaggtgggctatggattgtcaagtagaacttggttgcagggtggtggcaaagtgatcgaggctggcagagacctggtgagctaaatgcctggttacttttatagctcgtagcctcaggtgaactgatgagttccaagaagaaggatttgcaccctcgggatattgatgcattttggctgcagcggcagctcagtcgtttctatgatgatgccatcgtgtcgcagaagaaggcagatgaagtattggagattttgaaggtatggccaagatgacaatagttgtatatttagtgtatcttagcacatggggacagcgtatgaagtggcagatggctttggccttaatggtggtgttacctgctctctgcagacggccagtgatgatcgggaatgtgaaaatcagctggttctgctgcttggtttcaacacctttgatttcattaaagtgttgcggcagcacaggatgatgagtgagtatatggtggggtcttcctgcagagtgagtacatatgtgtgcatgtgtgacatagagattctgttgttttcacagcctaagtgcttgtttcttttatttttcttctttctaccctgaggatggttttttgccttatttcctcctcctcacttcctttgttccttttgttgtgggtagttttatactgtaccttgctggccagtgcacaaagtgaagctgaaaaggaaaggattatgggaaagatggaagctgacccagagctatccaagttcctctaccagcttcatgaaaccgagaaggaggatctgatccgagtaaggactgggttggtttatctgtctgatttctgagctaacggtggctagaagattgcagcatgaagctaaattcatgttaaaagtggaagttgaaaaagtaatttcctaaattctttggggtttatcagtgcatacaggttagaatcaacacatccacattggtttggtcatgagaccagtgacctgctgctatctttcaccagcactgtggggacctttattgtttatttacacagtaaatccatggtgtttactaaaatagagtaacagaacacatgtacttgcttaatggaacccacccttcgacccctcaggggtagcccttggtacttaattatagaacgtgtatttgtggcatccttgtactgcgcattgcccctttaaaagtgtttgtttgctttgatcattctggtggtccccatgtaaagcactgtctttctgtttcacgacttactagtcagcacctgtgactcaagtattagctaagcaggggcagaaaaggacaagaacctatgatactgatgaattgtttttgtgatttttatctttgtccactacaggaggaaaggtcccggagagagcgagtgcgtcagtctcgaatggacacagatctggaaaccatggatctcgaccagggtggagaggtaggatccagggcgatttatttcccaggccttgatggatggaaaactcacttgctcggcttgcttacttcctttgtgtttttgtctttcacattcccaggcactggctccacggcaggttctggacttggaggacctggtttttacccaagggagccactttatggccaataaacgctgtcagcttcctgatggatccttccgtcgccagcgtaagggctatgaagaggtgcatgtgcctgctctgaagcccaagccctttggctcagaagaagtaagtgaattgctttcttcagttctctgctcagttcacctcctggtttggatttcaaccattgaccaaaatgtagccttgtttcatatatagtttatttcagggctgaaagctgcaacagaattttcccattctgattttgagcccaggggacaatattgatctctggactgacctttaatggaaagttatgcaaagagattgccagggaacaaaatcctggcaatcccacaataacgttttgctcaaggatgctgccaacatgatattgatggcacttcttttcttctagcaactgcttccagtggaaaagctgccaaagtatgcccaggctgggtttgagggcttcaaaacactgaatcggatccagagtaagctctaccgtgctgcccttgagacggatgagaatctgctgctgtgtgctcctactgtaagcgccaccctgcctgctgttttcttgtagaatatggtgtggagtttccgttgcaagattgttttttatttccacccccaccccctaattctttgtcctttgatggaagagaggttaaatagtaggataaagtgcccaggacaagctctattctctatttgggaaataagcccatggaagttagggcagtgagaataaccaggtgaataggcgttctcatccctgacctctcccgtagggtgctgggaagaccaacgtggccctgatgtgcatgctccgagagattgggaaacacataaacatggacggcaccatcaatgtggatgacttcaagattatctacattgcccccatgcgctccttggtgcaggagatggtgggcagctttggaaaggtgagggagtagaactttcctgcagaggatactgggtgcacctatgaaagtgttgtggacaggcctggacctcaccgcttcttgtattagggcatctctggcatgcctcctgggattgttgttattttttatttttctctccccatttccaagatggaacttaacccaggtacagagtttctgaagtaagaatgtcctgagccatcttttacaagggttagcatctttctttcatcctctccatggcaattttctgcagttcgtatcatttgtgttattgaagtgtttatgaaacatcaaatggatgtggatgataatagacctagtggtgtattgtaggtcttcttatctacaagttgccatttcttcctcttgtgtacagagttcccagaggtctttttttttgagacagggtctcgctgtcgcccaagctggagtgcaatggcacaatcatggctcactgcagccttaacttcccaggttcaagtgatcctcccacttcagcctccctggtagctgtgattatagacatgtactactagattagctaatttttatattttttgtagagacagggtttcaccatggtctagaactcctgggctcaagcattctgcctgcgttggcctctgaaagtgctagaattacaggcatgagccaccatgcctggcccccagagatcttttgtctgctttatttgcctgagttaaatttggatttgtttgaggaagatatgttcataagatctgattcgccttgtattcacctgatgggttgatacctgctcccaatgccctacactccaattgcccaaacagaaagcatggtgtccaggccccttcaagcattcctgcctgatgtagttttcctcccacagcgcctggccacttatggcatcactgttgctgaactgactggggaccaccagctgtgcaaagaagagatcagtgccactcagatcatcgtctgcacccccgagaagtgggacatcatcacccgcaagggtggtgagcgcacctacacccagctggtgcggctcatcattctggtgagttgggagcagtcgtagaatatagagtccagttgtgtcagggcgggtttgctgggttttcatgcgaaatgtttctttgctgccttttctgtaggcactagcctttgtaatgactagtcctccaattccgtaggatgagatccatcttctccacgatgacagaggtcctgtcttagaagctttggtggccagggccatccaaaacattataatgacagctattgtcagcttgtgtttgccatcttatttatttatttatttgtttgtttgtttgtttgagatggagtctagctctgtcgcccaggctgagtacagtggcacgatcttggctcactgcagcctctgcctcccgagttcaagcaattctcctgcctcagcctcccctgtagctggaattacaggcgcctgccaccatgcccagctaatttttatatttttagtagagactgggtttcactgtgttggccaggctggtctcgaactcctgacctcgtgatctacccacctcagcctcccaaagttctgggattacaagcgtgagccactgcgcctagcctgccatgttattctttatatatttttttatgtctgaaatattttactacacttgatcttaagccaaaaggccaagaagctatgtctgaaatattttgaaacaaatgtaaacagatagacaaaaaaccatcatatccaacatcatttagggttttataagtaaaagaatccattctctgagggaatgagtgaggaagcaggatattgtattccatatacacagaaacttccagagattagtgactaagtctgagtatagtttaagttgtctgggaaaagcaagaaaggagacttcacgtgttggttttcagtgttctggagcaggggttggcagtctgtgggtactggctttgttctgttggaacatagttacacccatttgtttatgtattgtttacagctgcttttggctgcaatggcagagctgagtatttgcaataggggctgcgtgggccaaagcctgaaatactgactgtctggctttttttttttagacggagtttcactcttgttgcccaggctggagtgcgatgatgcaatctcagctcactacagcctccgcctcccgggttcaagcagttctcctgcctcagtctcccgagtagctgggattacagttgcccgccaccatgcccagctaattttttgtatttttagtagaaatggggtttcaccaatctgatggccaggctggtctcgaactcctggccttgggtgatgcacctacctcagcctcccaaagtgctgggattacaggcgtgagccactgcccccggcttttttttttttttttttttgagatggagcatctgactttttaaaaaaaacatttctggtccctgctttagagctttgctacttgaagcctgatccatggttggggtcatagcagcagcagcatggaataggagcttgttagaaatgcaggatttgtggcctcaccccacacctgctgaatacaatctcctttttaacaacatcccctggctttgggatacttaataaaatttgagatgcactgctttagactattcaaactcatcatttgatgtgtgatagcttttgttcttgggaactataactgccagaggtgaagcttctgatcagatcatatttatatcctttttcataaagaagtttacctttaagtaaagtttaaactcatttatctgagtttcagaatttctttatacaaagtatgttactgaactgtaccaaagcaactcatggtcagagtctgttactttctggagtatttcatgggaaatattgtctccatcctttgggcatctgtggcttgggatcccttgtcttttttcttaggcatattaggttatatgcctacaatatgggacaattccaggaaaagggactatgtatctctagtgctagaggtaatttctgtcctccaattccgtaggatgagattcatcttctccacgatgacagaggtcctgtcttagaagctttagtggccagggccatccgaaacattgagatgacccaagaggatgtccgactcattggtctcagtgccaccctacccaactatgaagatgtagccacctttctacgtgttgaccctgccaagggtctcttttactttgacaacaggtatcaggaaagactgggcaaagttctgccaaggtgaccatcctgctctctttcctcttttccaaggagtgctactgggttgggttttagaagggcctttgggttttgatgtggtgtgaatcataaaggaggaatattgctcttggggcagtgaaaaagactgtttattcccacagtattttctgccaaagcctcatttgtctaactgttgaacttctagcttccgtccagtgcctctggaacagacatatgtgggtatcacagagaaaaaagctatcaagcgtttccagatcatgaatgaaatcgtctatgaaaaaatcatggaacatgctggaaaaaatcaggtttgcccgtggtttatggttactcttgaaccccattctttcgaatgtttgattcaccaataattggggaagattgacagaaattaaaagagagaagacacaacataaatcaccaatatcagctatgaaatgggatattactacagaacctatagccactggaaggataataagggaatactatgagtaattttatgctcataactttaaaaattcagaagaaatggaccagttctccaacaactaccagttaactagcaaaactcagcccagatgaaatagataacatgaagagccctacaactattagagagttggagaattaaaaatccccccagcaagcaatccccagtcccagataattgttttgtgcattcgcattatccagggtccctccataaaagatttggggtcacttacactaaaaatgcaagacaataaaaagaggaaaatgaaaaactagagggcattttactagacagtgtgatagaatttttaaattgaaagtcgagttgagcaatgttaactaacaaaaaataaggaaaagtgactggttttgtatttctttttgtctgatgaaaagaagcatatgaatttatatgaagagacagatcttttcttggcactaaatactaggaagacttcattccctacaacagtgtactagtctcagacttatttcctaaatccttttataagtagtgtaatgttttagttgttattttgcagacacattttcatgcagctttgactcttgttaggtgcttgaacataaattctgagttgagaggcccgaatttgtagttgtagtctatttaaagttgctgttcaagataggatgttgaagttggtttaatttctcagctccaggactgtgaacttggtgggtgcattcccttaaaagtctttccagccgtgtttaggcttcctctgagcctgcacacattcctgcccttgcccctctccaggaccttggcttctggtggtgatggtgcaacttctgcttcctgctgcaggtgccctggggctgtgagtatctcgtgactgtagcaaactgtggcttctccttaggtgctggtgtttgtccactcccggaaggagactggaaagacagccagggccatccgggacatgtgcctagaaaaggacactctgggtctgtttctgagggagggctcagcctccacagaagtcctgcgaacagaagctgagcagtgcaaggtgaggaggggccagctgggttctctcattcctacctggcagctgtgtccatctcaggccccagacagctcctctaggactgtactgtggtattgttgtttcccatgggttaaggttgattgtctggatgtgattattactattccacataatagttaaggggcagggtctcatgggaggagatttccttagtccttggatgagtcctacaggaaggctcgcctcatccccggttctttgttccacagaacctagagctgaaggatcttctgccttatggctttgctattcatcacgcaggcatgaccagggttgaccgaacactcgtggaggatctttttgctgataaacatattcaggtgagggggtgcaaagcgtttggaggagcaggtgggacatacttcagaagatgggcaatgtcaagtttgtgccatgtttgctcctggtactttattgcttctggcccagctagcccaggtcagagggttgtggtggacacaataaatagaaccttatgctactctcccaactcttcccaccttgcttgagtttaggatagtctgagaagcatagtgaagcaagcactttggtgacttcagatagctccaaacagtgtctcatgggggcacgcgtgcccttgtcgttccctctttccggataggctctgttttaccttttctagtaactttaaggttgtttaatacaagtctgcacttgtgcctctggaaccttgaaatgttcattactgaatagatgaggaacccaaggaaacctttcctctttattctggtgtcacattgacaagtactgggaccccacgcgccctaccggctagtcctgagagaagctctgaggccaactgcctagagaagccagggatattaacccctggtgatggcatctgttctcctcattaccttgttttgcctctgtaggttttagtttccacagcaactctagcttggggtgtgaatctccctgcacatacagtcatcatcaaaggcacccaggtgtacagtccagagaaggggcgttggacagaactgggagcactggacattctgcaggtacagagccttttgagtttattctcagcagggatcagtatccttgcctgaaatgcagggatgctggaaagctagcagatcagaggtctagttctgtaatgtagatacctgcatcaaaattcagacattctcttgacatagcattcttggttcgctgtctctgatctagatgctgggacgtgccggaagaccccagtatgacaccaagggtgaaggcatactcatcacatctcatggggagctacagtactacctgtccctcctcaatcaacaacttcctattgaaagccagatggtttcaaagcttcctgacatgctcaatgcagaaatcgtgctaggaaatgtccagaatgccaaggtaggggaggactgcttgttgtgcttcatgctttccccgcagacaccaaggcaccaggagtgggtcggtccctattgtgctgcgggccagcagcgtccgaggccttccatccctgcacccacatcttgggtctggcagatagttccccttgttaccaagatcttagaagacgcttagatctttttaataatgaaatgctaaaaacattcagaatacgatgtaatatgcatccttgtagttgggaattaatttctaagcaattcatgggagcctgtcatttggacatcaagagtttctccatgctaagaaccatgagctgtgtcttgtaggatgcggtgaactggctgggctatgcctacctctatatccgaatgctgcgatccccaaccctctatggcatctctcatgatgacctcaagggagatcccctgctggaccagcgccgactagatctggttcatacagctgccctgatgctggacaagaacaatctggtcaagtacgacaagaagacgggcaacttccaggtgcgtggggtgagggttttgaggcaaaggtctcagcaaaagttgttggcccaggaaaaaatttttcagattgctctcttgatgtgagtactgcctatctaatcacctgttgcttagaacagcagaaaaatgggtagcttttcccataacttgaggtggataattcagctgtcttgtccgtgcagacatcatttcactatgggtcagcttattctgctgtttttcttcatgtgcctgggcctggcacttgtactgctgtgacttcatccagttgtcctattaggacaataatgacattgggtcatatactttaccaaaaaaaaagtacaaaaaacctataggacagtaacttatggtccacagttagaggttggagctcattaatagtcagcactggattgagtctaccttctctccaggtgacagaactgggccgtatagccagccactactacatcaccaatgatacagtgcagacttacaaccagctgctgaagcccaccctgagtgagattgagcttttcagggtcttctcattgtcctctgagttcaagaacatcacagtgagagaggtgagcctatgcagcatgatggggcggggagttggtgctcaccaagtcactgaatggtgtccctcctcggccacaaggctttcccttgaccttttcctccttgtggcaggaggagaagctggagctgcagaagttgctggagagggtgcctatccctgtaaaggagagcattgaggaacccagtgctaaggtgagctcctctcctctttgctttgataaggatgaggattaagtggttttcataatcttctaaaagatgaaccttgaatttgggttcatgtgtggtttcctgctcagttctcctagtttttgcagccttctcgcatgttctttttatatgaaataacaattatttagtatttgtaaatcaagacctgtagcaaatctcacctggcctggatgctcagagcagaaatgtaattccctttcttggactgttcagtgattggtctcctgctggctgattttgcttctttacagatcaacgttcttctgcaagccttcatctcacagctgaaattggagggctttgcactgatggctgacatggtgtatgtcacacaggtgagagcggagttgtatggcagctgtgagaaggggcctgaacagttcaatccctgtgtgctgtgtgcatcctggggaaaggaggcccgaccctagtgagatgggaggagtgcttagttctgctcttgccgggtagttggttggtgcatgtgtggtacagccactctgtagtatacatcttgagcacgtgggaaaggtaagaccttaagagggaatgcttcgaggctccacgggccctcagagagacaggaagagccacagcacgcagtgtctgcttcccagcagcaaagtgatttcccactgttgctgcacagctcataaataaatccaaaaatggcacagggttttattagctgctcttcatctttacctctaagaacaggtcactggtaccctcaactcttcctagaactctaaatgctaaatgactcaaaagctttaaaatcatgcagtgaatgttaggttaaaatgttgtgcagtgaccttgagccgcagcactcttctaattgttccccatccggcaagcatctactatatggaacggagaaaggcgtaaagacagaggggactttgcctttgagttagggtgggtggttgtgtcagagctggaggtaatgaaaccgtgtgtagagtggctcatgaggcctggggatagtcgagacttaacagtgggaatgctgcttctttgcttagtcggctggccggttgatgcgagcgatatttgaaattgtcctgaaccgaggttgggcacagcttacagacaagaccctgaacctctgcaagatgatcgacaaacgcatgtaaggacccagtgagctggatgctggtcaccatgagtgggggtccccaacccaagggtctgatgggaaagcctcagggtgcatctgatctccagacctgacatcggaagtatgacctgaaccttggtgcacattgagaagagggaaggccctctgtggtggaggccagggctggcacagtgtcagtgtctgcctttaatgactgtgttttgtgtagtcactgctaaactattggaagccatgaagtgggtggtttgtcacatccctgcagaagggaccaacagctttgcctccttcctggataggtggcagtccatgtgtcctctgcgccagttccggaaactccctgaggaagtagtgaagaagattgagaagaagaatttcccctttgagcgtctgtacgacctgaatcataatgagattggtgtgtgggatgctctcgcccttgtcctcactgcctgggtgtctctcccagtttgcctatgtagtcttcctgttcctaggcctgtgcattagtatcctgtgttcactccccaagtcccactgaagtacaggctggcccttggtctggggacttggaatcctgggctccactgaccataaagggaagaccctacccctttcccacagtggccctcaggcccagtttgcagtatagtaggcaggctgggctgcagcctcagtactctcatttccttgtaggggagcttatccgcatgccaaagatggggaagaccatccacaaatatgtccatctgtttcccaagttggagttgtcagtgcacctgcagcctatcacacgctccaccctgaaggtggagctgaccatcacgccagacttccagtgggatgaaaaggtgaggctttgctgggcagaggtgctggattggaggtgctcagtctacgttgctgggccgaggagatggattggaggcactcagtctacgttgactcacattccttttacccttgctcctgttggcaggtgcatggttcatccgaggctttttggattctggtggaggatgtggacagcgaggtgattctgcaccatgagtattttctcctcaaggccaagtacgcccaggacgagcacctcattacattcttcgtgcctgtctttgaaccgctgccccctcagtacttcatccgagtggtgtctgaccgctggctctgtgagtgtctcctctccagagtccccaggaacagtccctccaaggacagtagaagaatgtcttgcactttgtcccgggcttgcccttgctggggacagagtgatacatatgctgcctaggtttccagtgttcatggaggggatctagaggccagtgagggaaagagagcagtgcttatatccttcctgtttcttttctggcagcttgtgagacccagctgcctgtctccttccggcacctgatcttgccggagaagtacccccctccaaccgaacttttggacctgcagcccttgcccgtgtctgctctgagaaacagtgcctttgagagtctttaccaagataaatttcctttcttcaatcccatccagacccagggtaagtgtttccatccctcctctggaggcttttgaagtcaccgggagacagatgtgctctgtggcaggcaggggagtgggggtgctcaggcacttgggaggtctgggagctcctcagtgtgaccgctgggacccaccaggactttttcctttgtcagaagcctttggttgctttgctgctctgcatgtgtcactgtggaggggcaatagagcaaggccttacatggcatggtcatttctcgggcccaggaggcttagaggcctgcccctggcgctcaagtattgaaccagaaccatggggtggcactgaagcctcctcaccacatcatgataaataacggggacattcacagagcaggcactgtttcctcagtccatggctgagtacatcaccggtgttttctctcttattcctcccatcaagcctaaaaggaatctctattggagatactgccattagtgttccttttataggtgaggaactgaggcatagagggttccccagttgaaccaactgataaatagtagaacttggattttaattcagtcttgatgccagggataaggctcttactttctaccttaggctatttctaggaaacgcaggagagtgttgaaggggcagagaaagggatccagttcctttctgtcccgcatcctagtccctgagaagcaaagaagaatgtgtggcttcttttgctttgcttttgttgtcatcccacacatctccaggggacctgggctcttgatcttggcctcttcccctttaactgttaagtgggagcaggtaagggggtacagtagggctggcctggagttagaggcttggatgccttagctcctctgtctgcactccagaactgcctgacttcatttcgtatgttgtcctttgttttgacaattgatccatgtcccagtccgtctcttcttccttcttgatacttacactgcttctttctgttggtttccagtgtttaacactgtatacaacagtgacgacaacgtgtttgtgggggcccccacgggcagcgggaagactatttgtgcagagtttgccatcctgcgaatgctgctgcagagctcggaggggcgctgtgtgtacatcacccccatggaggccctggcagagcaggtatgacgtggcgctgtgtcatgtgaatttcccaagaagcatttcatctgtgattccgtatgaaggctttctaagccctgaaatttgcagggtcatttcctcagtttgtgtattaaagaaaagctgccccagccaagcgtggtggctcacgcctgtaatcccagcactttgggaggccgaggcgggcagatctccggagatcaggagttcgagaccagcctggccaacatggtgaaaccctgtctctactaaaaatacagaaattagctgggcgtggtggtgtgcgcctgtaatcccagctacttggaaggctgaggcaggagaatcgcttgaacccgggaggcggaggttgcagtgagccaagttcgcaccactgcactccagcctgggcaacaagagcgagacttcatctcaaaagaaaaaaaaaaaagaaaaagctgccccatcgcatcgcatagaggctgctatgggattagaacgtagcttgagatctgcaggtcaacaggtctgtttggcatctcaggttttcctcacataagtgaaagatgcctggtatggcctagtgttgttctgcctccctcctctgcccgccaggtatacatggactggtacgagaagttccaggacaggctcaacaagaaggtggtactcctgacaggcgagaccagcacagacctgaagctgctgggcaaagggaacattatcatcagcacccctgagaagtgggacatactttcccggcgatggaagcagcgcaagaacgtgcagaacatcaacctcttcgtggtggatgaggtccaccttatcgggggcgagaatggggtatggcgtgaccttgcagcacagatgagggactgggactgaccaagtggccttggcattggacctaatgtttgggtctgaggacggaggctcggggcttctccccagaggattctacctgctgccctattccaaagggacaatgttaacttttttggtagtactttaggaaaacagtattgtttagtggaggttggctgccgtggaggaggtagaaccaaacacatgagagctcctagttagaaggaagaatgaggtcattttgaggctgttgggctgttcacaaaggggacctccaggcagaggatgggagccttggcctgcagtgaccctccctccctccctctttccagcctgtcttagaagtgatctgctcccgaatgcgctacatctcctcccagattgagcggcccattcgcattgtggcactcagctcttcgctctccaatgccaaggatgtggcccactggctgggctgcagtgccacctccaccttcaacttccatcccaatgtgcgtcccgtccccttggagctgcacatccaggtaggacccactctcctcatccgtctgtggggtgtcacatagatcctgagtgacccaggtctgataaccttggtgtcttttcttctccccggtcgccagggcttcaacatcagccatacacaaacccgcctgctctccatggccaagcctgtgtaccatgctatcaccaagcactcgcccaagaagcctgtcattgtctttgtgccgtctcgcaagcagacccgcctcactgccattgacatcctcaccacctgtgcagcagacatccaacggcagaggtaggtggggcctggcgtctgggggttggggttaggttaagtgaggctggcctactccaagggtgtcctctttatgagggtggggttagcccatgttgcttggggccaggttctgcacagctggcaaagtgtctgccaggaattgaactactctgagctgagccagtgcctgtaccgcacaggttcttgcactgcaccgagaaggatctgattccgtacctggagaagctaagtgacagcacgctcaaggaaacgctgctaaatggggtgggctacctgcatgaggggctcagccccatggagcgacgcctggtggagcagctcttcagctcaggtaagtcaggccacggaaggggagcatagcaagggtatcaccaagtggtggtgttaaacttgaggggtgcgggtggcagtgttttctctacagcataccagagattttcaaaatactgtttaggactcttggctgttaactcatttgatcctcccaagaacctcgtgaggcaggtgagacaaacactatccctacttgccaggtgagaaaacaggcagacacatcaggttgtgctatttcagaacctggttttctagagtccaggacctttggccaccagaccgctgattctccgtggataccagactccccaagtgtattagtccgttcttgtattgctataaagaaatacctgatactgggtcatttataaagaaaggaggtttaattgactcagttctgcaggctgtacatgaaacatggtgttatctgcttctgggaaggcctcagggaaggcaaaggggaagcaggcatcttatatggcaggagtcaggaccgagagagtgagtggggaggtgctacacacttttgaacaaccagatctcgtgagaactcattcactagacagtaccaagggtgggtggtgctaaaccattcatgagaactctgcctccattagccagtcatctcccaccaggcccttcctccaacactggagactacaggtcgacgagatttggtggagacacagatccaaaccgtctcaccaagatagttagactttagagattagcacagaggagagctctgattctcccttgagctcactcttgctggccactgtctcttgttgccctgtggcattttgtgcaaagatttacgttttaatactgtttattggagcctcattggagattcttctgccagaatcacttcctgtcactctttggcccttgaatctgcctgtttggggcatgcttagagtgatctctgttttgctggcatggctgagccagcccgtggctgcatgagtgttagcactttctggtcagaggagcagtccatcagctgtagttttgccttggtgttcctgggctttgggttctgttctatgatgacttgttttctcctggatagtcccagagcaaggcaccagcagcgtggagctacctcatagcaatgtgttagctctcattcatgttagaccttgttcctagccagccttgctgtgagttctgaaacatagcacagggtaagccacggcctgcccatgaggcagtgagcctacttcacccggagacccctgccctcagccttcctctcccctctactgctcaggggctatccaggtggtggtggcttctcggagtctctgctggggcatgaacgtggctgcccacctggtaatcatcatggatacccagtactacaatggcaagatccacgcgtgagtacaactggtgctctgtgttagcacagacctccttcctaaaatgaatgtgaatctgcagatacacagaaagtaagctaggatgaagaaaaggtgttagggaagttaacagctgagatgccaccagagccaagtgtttgagagttttgtgtctcaatacctaggctcacatttgctttttagtcattgtgcttccttattcagcagctgggagaggtaggaaattagagccaggaggaatgtttgacgttacgtcattaatctcagacatcttgtagattaggaaaagtgacttggtcgaggtcatacacctatatagtgacaagtaagaagctagaggagtgccgagcgcagtggctcatgcctgtaatcccagcactttgggaggctgaggcgggcggatcacttgaggtcaggagttcaagaccagtgtggctaacatagtgaaacccccgtctctactaaaaataacaaaaattagctgagtgtggtggcaggcgcctgtaatcccagctacttgggaagctgaggcaggagaatcagttaaacctgggaggcagaggctacagtgagctgagatcccaccattgcactctagcctgggcaacagagtgagactccaactcaaaaaaaaaaaaaaaaaaaaagcctgggtgtggtggctcacacctgtaatcccagcactttgggagggcaaggtgggcagatcacctgatgtcaggagttcaagaccagcctggccaacatgacaaaaccccgtctctacaaaaattagccaggtttgatggcaggtgcctgttattcaagccactcacctgtaattcaagccacttgggaggctgaggttggagaatcacttgaacccaggaggcagaggttgcagtgagccaagatcgcgccattgcactccagtctgggcaacagagtggtaccccgtctcaaaaaaaaaaaaaaaaaaaaaagggccaggtgtggtggctcatgcctgtaatcccagcactttgggaggccaaggcgggtggatcacaaggtcaggagttcgagaccagtctggccaatgtggtgaaaccctgtttctactaaatatacaaaaattagcctggtgtggtggcacgcgcctgtaatcccagctacctgggaggctgaggcaggagaatcgctggaacccaggaggcggaggttgcagtgagccgagatagcaccactgcactccagcctgagcaacagagcgagactccatctcaaaaaaaaagaagttagaagagtcagtcattctcataaaaaagcctgcataatttgttgttgttttttttttaagacaatcttgttctgtcgtttaggctggaatgcggtggtatgatctcagcccactacagcctctgcctgccaggctcaagcaatcatcctgcctcagtctcccaagtagctgggactaccagcatgtgccaccactcccagctaatttttccttttttttgtatagatgggttttcaccatgttgcccaggctggtcttgaattcctgagctcaagtgatccacccacctcagcctcccaaagtgctgggattacaggtgtgagttatagtgcctggcccaacgcttaataactttttcctgaaatgcagattagtttgaaatgaattttatttacgggttcatttttaatgtttgaacctgcttctaggtagggttaaagttgggtgacttgatgactcacgaaatacacaactatgaagtttggaaagtgtggtggtatgcacctgtagtcccacctgctctggaggctaaagtgagaggatcacttgagcctaggaggtaaaggctgcagtgagccgtggctgtgccactgcactccagtatggacagcagagcaagaccctgtatcaaaaaacaaataaaaacaataataattttttttaattaaaggagaaaagtttgggaagtttgacttacatatttgatcctcgaatagggagttattttggttttggcattagatagttttgtagcttggttcatggcacttgagcagcaaattcatggcccttacactgaatactaaaatgttatacaggccagccagtgaagctagttgtaagtgcagagattcataaacagagtcgtcccgtgatttgtccgtgtctccccgtattaacattttactcttacttggcgaagggagttgggcttcctgagcatggtctccgtgttgaggtggcttttccttctttccctgcttctgtcaccagctatgtggattaccccatctatgacgtgcttcagatggtgggccacgccaaccgccctttgcaggacgatgaggggcgctgtgtcatcatgtgtcagggctccaagaaggtcagtcctagactcatggagcctcttggatccgtagcctcagaatggattctttaatctttcttttgatagatgtcttcagtaactttagtctcttaacttctgcctctcttatttacacaattcttttgtgacgagcctgccacccacatggaattttgctgccttttgcttttgctgctgccgttggctccacgtgttgaggtcttcaccctctacttggttctctccttcctccttgggctgctcactgctctgccctcgtgacttgctgtacctctgttcccactgcgtattgtcaccagtgatgcactttctaaatgtgtggcttcttccattttggtattagttaggtctcacacagggaccatgccctgttgatttgcccttggccctctgtgaccgtgttgtcactaattctttattactccttctccctctccaacccacaggatttcttcaagaagttcttatatgagccattgccagtagaatctcacctggaccactgtatgcatgaccacttcaatgctgagatcgtcaccaagaccattgagaacaagcaggatgctgtggactacctcacctggacctttctgtaccgccgcatgacacagaaccccaattactacaacctgcagggtcagtgggcttgggagcacacgtgatcctttggtggttctcacagtctttgctgggcatcttcttgaggctccccactcacctctcgcctccataggcatctcccatcgtcacttgtcggaccacttgtcagagctggtggagcagaccctgagtgacctggagcagtccaagtgcatcagcatcgaggacgagatggacgtggcgcctctgaacctaggcatgatcgccgcctactattacatcaactacaccaccattggtgaggcccggcatggcccgtgtcctgtctgtgggagcctttttacacgggtcaggagcccactgggatgagaggtgcgcccgtgtttgtcagcgggatgacactgcaggggacagcaggggagcccgggcagttctgctccttctctgcctggttttagcttctctcacatttcctttttctgtcagagctcttcagcatgtccctcaatgccaagaccaaggtgcgagggcttatcgagatcatctccaatgcagcagagtatgagaacattcccatccggcaccatgaagacaatctcctgaggcaggtgaggacagcagacttcaggagagcatcctgggaacaacaaactcggcctgtgtgcccagagcacatggcatccctgccaccaacacgcccatacgcatcccccgacccccgccatatgtcctcccgctccatacctccctcaaacccatctccatcccattaccacccacatgcctcagggtgttgaagggctgtgtgagcctgggccacgtggtgctttggcctgagctggtctcaggcagggtcacctgttcatcaccagctatttttcttccactttgtagttggctcagaaggtcccccacaagctgaataaccctaagttcaatgatccgcacgtcaagaccaacctgctcctgcaggctcacttgtctcgcatgcagctgagtgctgagttgcagtcagatacggaggaaatccttagtaaggtagagtgtgggtgtggggcagaggggtcagtggtgctctaaacatctcagctccaactccgcccacttttatactccttttcctgttcaggcaatccggctcatccaggcctgcgtggatgtcctttccagcaatgggtggctcagccctgctctggcagctatggaactggcccagatggtcacccaagccatgtggtccaaggactcatacctgaagcagctgccacacttcacctctgagcatatcaaacgttgcacagacaaggtgagccgggtcagcctagagggtcaggtgggtgagcctgagagcccagtgttgtggaccgagcgtgggttgcgggaggtgagtctcagtaagttaaacttttagttatggttcctccgaaggtgctccctgttgagatgctagagagcctgccaactgtgggctgtgttctttctgcagctgttttatctagatgacttgatagtgtaggaggtaaaattagtagctctttgctgcctgtgtcatttgctgttggcccgtgttctctctttcctgacgtctgaatactcactgcagggagtggagagtgttttcgacatcatggagatggaggatgaagaacggaacgcgttgcttcagctgactgacagccagattgcagatgtggctcgcttttgtaaccgctaccctaatatcgaactatcttatgaggtggtagataaggacagcatccgcaggtgagccagaggtggtgcctgttgggcacagcataatagtgtgctctgagcccactgccccatcactgacgtgcgcccctcctctccccctgcagtggcgggccagttgtggtgctggtgcagctggagcgagaggaggaagtcacaggccctgtcattgcgcctctcttcccgcaggtgcgtcctggtagctggcttggtcaggtgtcaactcaccctatccattggctaggtgcttggtacaagggcacactgtccctgagggagggaaactttagactgataatcagctcacaagggtgagaattaatcttgaggctatggggttttttttctgtttgtttctgcttaaacagtttagggccgggcgcagtggctcacgcctgtaatcccagcactttgggaggccaaggcgggcggatcacgaggtcaggagttcgagaccagcctggccaacatagtgaaaccccgtctctactaaaaatacaaaaattagctgtgcgtggtggtgggcacctgtagtcccagctactcaggaggttgagtcaggagaatggtgtgaacccaggaggcggaggctgcagcgagccgagattgccccactgcacaccagcccaggcgagtgtgagacttcatctcaaaaaaaaaaaaaaaaaaaaatttagatgactggtcattgttaaacccgtcagttgtgtagtattgtccatctctctgactctttaagatgcatttgtctttaactccgatggctgcaggacacttgggctttcctggttgtttcttcttttttctcactgccacttactgtgcttctgggtgcttggttttttaccaccagaaagaaattctggttctctttatatgggagaataattgaaggttgatagcagaaaccagatactgtcatgtttaattctgtaaactaattgtttcaaggctctgagtaaagactgcttttaactgggactcttcgtctttgtgacagcggggcagcccgtagacagggctgcaaggcctgctgtggatatctctgtgcacattcagctctgtgttaagctttttctttttttttgagacggagtctcgctctgtcgcccaggctggactgcagtggcgcgatctcggctcactgcaagctccgcctcccggaatcacgccatcctcctgcctcagcctcccgagtagctgggactacaggcacccgccaccatgcccggctaatttcttttttgtatttttggtagagacggagtttcaccatgttagccagtatggtctcgatctcctggcctcgtgatccacccgcctcggcctcccaaagtgctgggattacaggcgtgagccaccgcgcccagcctaagctttttctcatctggcagatttgccttgtacttaaaagtatctctaaggaactcaaagctcctaggccccaaagactagacctctaatagtagtaccttggacttagtggcaggtactaagtgggagaaggtaccttggcacaaggaaatgagccagaaccaacaaatgaattcatctacttaaaaaattaagtctgtttgagacaacttttgatagtattaaaatgttaaatctaattgtatttcgggaagaaactttggaaagctatctgatttttgttctctcttttgtaactgtaccattttcatggttgcctatggtcatcaagttttacatgctgaaattcttggttttggatcactgcagaaacgtgaagagggctggtgggtggtgattggagatgccaagtccaatagcctcatctccatcaagaggctgaccttgcagcagaaggccaaggtgagtgtgtccactggccctagcatttgttctggcatgggggaagggtgagaatgcttcctgtgtccatgctcatcttgatttctgcctgctctttctaggtgaagttggactttgtggccccagccactggtgcccacaactacactctgtacttcatgagtgacgcttacatgggatgtgaccaggagtacaaattcagcgtggatgtgaaagaagctgagacagacagtgattcagattgagtcctgaggcatttacttttgggtaaaggagagttgagcctgaattaggaatgtgtacattgtaggaatcctggttgtggggaccaggtctgtgggcctcaggtctggccagccagggctggtgctgtccccgcctacctccacttcctttcccttgctcactctggatccagtgacagcaggtgtcatgggtcaagcataaatcatatatagcattttcaggcatgttcctggtagttcttttgagtctgacattctaataaaataatttgtagaaaccatttgtctttgtagtgattccaaattaaaagttttctttctccaacctgagggcacggccaaaaagatctggttattttttagccaggaacgtgcttgttaatgagtatgtctggaggacagacctgctcattaggtgtgctgtcccctgtagcctcgtgagtcagcccagaggagggtacatgcgactgtggcctggcctcagtggtacccacacatcagcactaccacaagaaccaacactgagcctcggaagctagatcacaggttaggggtttctctagatgggggttctgaaatttgcagtgtctgctcctgggaggcagcaccagaaagggcactgaaatgtactagctggatgtgacccagtcttaataaacaggttttctaatccagatcttccgactgtcttcaaattcttaccttctgttctttagattaaatgcacacaaaattgaaagatgattctgaagggcagtttcctcagggtagcagttttcaaatgatttggtcttaggacctctttacactactaaaaactaagaaactcaggtttttgtttttttttttttctttttaaataacaaatttatttttcacagttctggaggttgccccaaaaagcttttattatctagattaaggttaatgcacttttaaatcataatgttaacattttttttcttaatagagacagagtttagccatgttgcccaggctgaccttgaattcctgagctcaagtgatccgcccacctcagcctcccagagtgctgggattacaggcatgagccaccatgcccagcccacgttaacattttttatgaagaataacttccaaaacaatccaaggagaagggtggcattttacagtctctttagtatcttgttataataaacagttgaattcttacagctgcttctacatccaaacttttttgttgaagtaagttgacttcacacagatacgcagttggaaaagtttttaaaatagccttttcagctaattgtggctattctttgataccacaccaagactacaagtgattttttttttttttttttttttttgaaatggagtctcgctctgtcacccaggctggagtccagtggcacgatctcgactcactgcaacctccacctcccgggttcaagctattctcctgcctcagcctcccgagtagctgggactacaagggatctgccaccacgcccggctaatttttgtaattttagtagagacggactttcaccatattggccaggctggtcttgaactcctgaccttgtgatccacccaccttggcctcccaaagtgttgggattacaggcgtgagccaccgcgcccggcttactacaagtcatagtttcttaaaggcaatgtagactccgaaaacttaatgcactcttatattgttaatacattaaaatccactggcctgtcttacacttttgaatcaatctttgagccatgcatgattttgtaacatcacgtactggtcacttggaaaaatggttcattgaattcttccaaatgaaatgcatttcattatacaaatcacatttgttaatatccccaacaataaagctcatggtggagtacagattttcggaaattccaatttttgcttgaaagctttatcactggcaacactatcagttgtttcccttgaggtgagaggctcattccattaatttccagaaaatatcagccaaatattcaagtctaaataccgtaatctgctagttctttcaattctaaagggcatgccttgaacacagccaattcagcttgcaactcaactgtgtaactgcttttcctcaaggcacccatacttcagtgcacagcagaggggctttatgcatgcttccagttttctcagaatattataaattctcaaggtcaactttttttttctttttgagacagggtttcactcttgttgcctgggctggagtgcaatggtatgatctcggctcactgcaacctccacctaccggattcaagcgattctcttgcctcagcctcccgagtagctggaattacaggcatgcaccaccatgcccagctaattttgtatttttagaagagacggggtttctccatgttggtcaggctggcctcgaactcccgacctcaggtgatccgcccgcctcagcctcccaaagtgctgggattacaggcatgagccactgcgctggctaggtcaacatttaatagttaaccattgctatttgttctatcaaggacatatcaaaactactagaagtttgctgccaccaccttgattcatgccacagtgccaacagttgacctcacagatcctccctgaaagggtcttgggactcccaggatctgcaggccgcattcttcgagaaccactattctaggtacagc

SEQ ID NO: 778 - DNA, 19871 bp, Homo sapiens
agtgatagaccaaatgtgacataatgtaatcagttgatgaatctggatgaagggaacacagcagtgctttgcactattcttggaactctatcataaattttaaattatttcaatgtaaaaaatttgtttttaaaatctaaattagacctagactatttgggaaggcagcttctaattttggcaggagctaaaaacatggagatgaagaggaaattaatcttgatacaataaagatttttattactttattactttattacttgctttgtcgcccaggctggagtgcaacagcttggctcactgcaacctctgccacctgggctcaagtgatcctcccaccacagcctctccagtacctgtaaccacaggtgtacatctccaggtccggctaaattttgcattttttgtagagatggggtttcaccatgttgcccaggctggtctcgaactcctgggctcaagtgatctgtctgcctcggcttcccaaagtgctgggattacaggtgtgagctactgtgcctagcctaaagctacttttttttttttgagatggagtttcgctcttgttgcccaggctggggtacaatgtctcagtcttggttcactgcaacctccgcctcctggtttcaagtgattctcctgcttcagcctcccaagtagctgagattagaggcatgcgccaccacgcccggctaattttgtatttttagtagagacagggtttctccatgttggtcaggctgaacccgacctcacatgatccgcccgcctcggcctcccaaagtgctgggattacaggtgtgagccaccactcccggccctaaagttacttttatttaaatatctttattggctgggtggtggtatgtgcctgtaattctagcatgtgggaatgccaaggtgaaaggatcacttgaggcaaggaattcataaccagcctaggcaacataatgagaccctgtctttacaaaaaagtttttttaattagccagatgtggtggtgcacacctacataaataaataaataaataaataaataaataaataaatagggccgggcacagtggctcacgcctgtaatcccagcactttgggaggcggaggcgggcagatcacgagctcaggagactgagacacggtgaaaccccgtctctactaaaaatacaaaaaattagccgggcgtggtggcgggcacctgtagtcccagctacttgggaggctgaggcaggagaatggcgtgaacccgggaggtggagcttgcagtgagccgagattgggccactgcactccagcctgggtgacagagcaagactccgtctcaaaaaataaataaataaataaataaatctatgtatcattattgccctagtatttctttcagttttgtcttttttttttttttcttttgagacagagtttcactcttgttgcccaggctggagtgcaatggtgtgatcttggctcactgcaacctctgcctcccgggttcaagcgattctcctgtctcagcctctggagtagctgcgattgcaggtgcctgccacaatgccctgctaattttttgtatttttagtagagacggggtttcacaatgttggccttgaactcctgacctctggtgatccacccacctcggcctcccaaagtgctgggattacaggcgtgagccaccgcgcccaggcttctttcagttttcaggaatgttgtggagctgtgtcctgtttgcctcatggagctgatgagctgggagaattcaagggggttgatggaaggggagaaggtaagtccccaagtgacccagttgaaaaccagggcctgggccaggcacagtggctcatgcctgtaatcccagtactttgggaggctgaggcgggaggattgcttgaggtcaggagttggagactagcctggccaacatggtgaaacctcgtctctacgaaaaatacaaaaattagccaggtggggtggtacacgcctgcagtcctagctacttgggaggctgaggcaggaaaatagcttgaacccgggaggcagaggttgcagtgagctaagattgtgccactgcactccagcctgggcgacagagcaagactctgtcttgaaaaaaaaaaatgttgtgtttcaaacaacttttgacaatcagtgctgtaaagctgaatcccagagacaactgagataggagcaggaagatctgtggtccagtctccctctggccttataattatcttcctgagttacttaccttctttgagacagtgtttgcttgtcctcccaactagcctgaaaacttcttaggagaagggccagcctttggggtcatgttcctgtgtgacctgtctctaggaacttctgcatacccagctctgcccacttggagctagtgtccaggactccacagcactacccgcactaaatacctcggtctcagtcttgtgacagaaagtggccagtgtggtggacatagtgcagaggtttagggtctgaccaacctgggacagcaatttatgggctaggtgacatccttgagcaactgtatgacctcaggcctgtcatatggtctctgagcctcaggtttttcttctgtaaaatgggagtgataaaaccgacttctctgctgggtatggtggctcacgcctgtaatcccagcactttgggaggctgaggcagatggatcgcttgagctcaggagttggaggccagcttgggtaacatgtcaagaccctgtctctacaaaaaatataaaaaattggctgagtgtggtggtgtgcacctgtggtccaagctactccggaggctaaggtgagaggatcgtttgacccctggagttagaggttgcagtgagccgaggtcactgcactgcactctagcctgggtgacagagtgagaccccatcttaaataaataaataaagtattttgtgtaaacacttgtaactgtatttcattgagtgtgatacatgtatatacaaagaaacataaatagttgccagttaaactatgacacatcatcatcaactggaactggaactgaaatcacatactgacttcagcaatgtgaaacattggccggtcgcggtggctcacgcctgtaatcccagcactttgggaggccgaggcgggcggatcacgaggtcaggagattgagaccatcctggctaacacggtgaaaccccgtctctattaaaaacacaaaaaaattagccgggcgtggtggcgggcgcctgtggtcccagctactcagtaggctgaggcaggagaatagagtgaacccgggaggcggagcgtgcagtgagccgagatagcgccactgcagtccagcctgggcaaaagagcgagactccatctcaaaaaaaagaaaaaagaaaaaaaaaagaaatgtgaaacaaaggccgggcgtggtggcactttgggaggccgaggtgggcggatcacctgaggtcaggagtttgagaccagcctggccaacaggggttaaaaatacaaaaattagccgggcatggtggtgcatgcctgtagacccaactactcaggaggctgaggcaggagaattgcttgaaccggggaggcggaggttgcagtgagctgagattgtgccactgcactccaccttaggcaacagagggagtctgaaaaaaaggaagagaaaagaaagagagagagagagaaagagagagaggtagggaggaaggaaggtgggaagggagggaagggggggaaagggagggaagggaggaaaggaagggaaggaaaggaaagaaaggaaagaaaagatagaaaagaaaggtggctcgtgcctgtaatcccagcactttggggagctgaggcaggcggatcacttgaggccatgagttcgagatcagcctggccaacatggccaaaccctgtctctactaaaaatacaaaaattagccgggcatggtgtctttgcacgcctataatcccagctatcccttgaacctaggagttggaagtggcagtgagctgcagattgcgccactgcactccagcctgggggacaagagcgagactccgtctcaaaaaaaaaaaaaaaaaaagtgaaacaaaaagtgtgccttaaaatagatgaagtactgtattattattattattaaagggctggagccagaacaagttagcattttgtgcctcgagattcaaatcccaggtctaccatttattccttgggtgacatttttttggggggaggggctggaggacagggtctcactctgtcgcctagactggagtgaagtggcgcgatctcggctcaccgcaacctccgcctaccgcgttcaagcaattctcctgcttcaggctcccgagtagatgggactacaggcgcgcgccactaccgcccggctaatccttgcgtcactttaagcaagacacttgatctctctgtgcctcagtttcctcacccgcagaatgaatatcaatagctcctgctacacaaaactgtttgggctattaaatatgtgaatactcagaaagtacctggcacaaagtagccttatcattgctattatttagaacaaagttattgtttccaggtttggaggtgggctggcggagggaggagaagacgcactaggttgcctttcagaaaaggggtccaggccttatcctgcctcccaggtggactcggcccgggatcccgagccccgccccctccaggccccgccccgccccgccctcgctggccgagactctgtgctactctcgcgcgctttgaaagtgcgcgagctccgaccgagacctgggccggcggttggtcggccgaaaccatctgctacgttacgtggggggaggtcagctcctatacagccacacttttttcaatcttcagcttttcaggcctaggtcctggttttattttagctttcagagcttctctgtaggcttgaatttccaggaggcagcccgagtccctggggagagggtcatcgtggctctcgtcggtgccttccacctctggacaggcaaccggtgggagaggacgccggtgggcggggggaggaggcggccctagcgccattttgtgggagcgaagcggtggctgggctgcgcttgggtccgtcgctgcttcggtgtccctgtcgggcttcccagcagcggcctagcgggtgagtcgcggagccttctcactgaggacgccgtaggtgcctcggcttctgcattggggcggcccgaggcagacgcagcggcttcggaccctgccccgggaagtcagccgtgagaccgggcctagtcctgcccgagcgggctcgcgcgggagcgtcgttaggtcctggcacggggaggccggtggcgccgaaacggggggccgggcccgcggtgccgcgtagcctgaggcggaggttggccccggacccggacagtgccggagccttcggtactttgtacttcgagggacgctgccagcttgggcctggtgctcctgcgccccaccccgggccgcgccgagaaactcctccctcggctggcacgcgcgggcttctgggaggcgacggccggcaccgccaggacctgtcgccgcgggccttggggctcgggctcgcagagcccccggaagccccaaaatgaggaacagagggaaacttttctcctgttctttacacctggttcactgcccatattcagtcttcaggttcagctgatggatcgcttgcttaggaaaatcgactgggacctatcacgcccatgcctcagccagttaggctcctcctctgccttcaggattacttaacgactaacccgattgtcataaaatagctactgtttattgttcccttgcataccctagcttgtaaccagcaagccacgttggactcacagttacagtttcagtacctgacgcatcataagccttcagggaaagttttttgaatgaatgaactggcgaggcatcacattttgataggaaatcactacccttaccttcacctcgtcatttttcagggataaccaatgcatatacgaatccagacaagcatttttctggaagtcagaactctgacatggtttgggtattatcattataaggaaacagttattctgacatgaatgttgttcattcatatctcttttctctttaggaaaagtaaaagatgtctgaatatattcgggtaaccgaagatgagaacgatgagcccattgaaataccatcggaagacgatgggacggtgctgctctccacggttacagcccagtttccaggggcgtgtgggcttcgctacaggaatccagtgtctcagtgtatgagaggtgtccggctggtagaaggaattctgcatgccccagatgctggctggggaaatctggtgtatgttgtcaactatccaaaaggtttgttaccatttggtttttgtaatcatgctgaagtgtgttcaggtgtgtgtctcatccatggatcttagcctcttttggtggcagaatgtctcctgaaacttaagtatttccttgaacttcagtgttagacaagtttggaagaccacgagtctaaatttatggaaactggggattgtagatcattttaaaagagaaaacaatgtatttaaaaaatatctgaataaactttgccaagttgatgataaatttcaggaatcactaagaatgttttgtacataaatcattgttgtaaatagattcttctgaagtgcttcagtgtttggatttgatcattgtccttttggtgttacatcattcattcagcaaatctgagttcattttttcccttaaatgagcaaacagttggagtagccaaatcttgaattagtgcagttccaattacaatttcgaggttctggtcttatccttctctctgcctcttatcaatgatgttctaaatctaagaaaaggaagcatgaagtttaagaagtgtgccaaggaaatacctaatttcagcattttgaagtagtgtgctgttagtagtcgatctgtctgtgtgttccttttattataacttggtattgcaacaaagtccatcaaatttggtcagtatgcaagacacccttttacatgtctaggaaaactttagggctaggcacggtgactcatgcctgtaatcccagcactttgggaggccgaggcaggtggatcacctgagatcaggagtttgagatgagcctggccaacatgatgaaaccccatctctatcaaaaacacaaaatctctggatgtggtggtgggtgcctgtaatactagctactcaggaggcagacgcaggagaatcgcttgaaccgggaggcagaggttgcagtgagcagagattgtgccattgcactccagcctgggcaacaagagcgaaactccgtctcaaaacaaaaaaaaacgaaaacaaaaattggcgtggtggcgggggcctgtagtcccagctagtctggaggctgaggcaggagaatcgcttgaacctgggaggcggagattactttaagctgaggtcgcgccgctacactccaacctgtgacagagcaagacttcgtctcaaaaaaaaaaaaaattgataatgtaaactcggggtttttagtatgctgtttcttcagccagtgggtatagattaatatttactcaaatttaaaatgtcaggctcggtgcaatggctcacacctgtaatcccagcactttgggaggctgaggcaagcagatcacctgaggtccgaagttcaagaccaccctagccaacatggtgaaaccctgtctctactaaaaattcaaaaattagccaggcgtggtggttcgcgcctgtagtctcagttatttgggaggctgaggcaggagaattgcttgaaccgggaggtggagattgcagtaagctgagatcgtgccactgctctctggcctggcagcagagcgagacaccgtctcaaaaaaaattttttaaatgtcatttaatttatctccccaggctggacatggtggctcacatctgtaatcccagctactcgggaggctgaggcaggagaatcacttgaacccgggaggcagaggttgcagagaggggagattgcgccactgcactccagcctaggtgacagaatgagactccgtctcaaaaaaaaaaaattatctccccttctcttctaaataacctaaggttgaggttatttggggggtttttttgttgttgtttgtttgtttgttttttgagacagtctcactctgtcgcccaggctggagtgcagtggcacgatcttggctcactgcaacctccgcctcccaggttcaagcaattctctgcctcagcctcatgagtagctgggattacaggtgcctgccaccacgcctggctaatttttgtatttttatttatttatttttatttgtttatttattttttagacgaagtctcgcccttgtcgcccaggctggagtgcagtggcacgatcttggctcactgcaacctccgcctcttgggttcaagcgattctcctgcctcagcctcccaagtagctgggattacaggcacctgccaccacgcccggctaattttttctttatttttagtatagacggcgtttcaccatcttggccaggctggtcttgaactcctgaccttgtgatccacctgcctcagactcccaaagtgctgggattacaagtgtgagccaccgcgcccagccagttatgtttttttaagtaagccaaacttttggtttctttttcttttttgaaattagagatggaggctctcgctctgttgcccaggcatattgcagtggctattcataggcacactgcagcctcaaactcctggactcaagtcgtccttcctcctcagcctcctgagttgctggaacttacaggcatacacaccactgtacctggttttctgttttattacaaaagttgtgtatttgttgttgaatgtttaggaaagataaaagttaaatcttcatcaggatatacaagttgctgatatttaaagtcaaagtgaagtagaattatttttgttttgataaaccttttgagagggagagattgtaatccggaaatgctacaaaaaacaaacttggaaatcactgaatttgcaccagaaaagcacctcagacactaaacttaagcctttattctgtcctctagagcaaacatcacttcttgccaagttttcagtgtcttattcttcttagagtcttctttttgcttctcatttctagatgtaggaggtagtgtttttaaagaagtgctaagtgaagatttctaaaaggtttctgctcgttttatttagataacaaaagaaaaatggatgagacagatgcttcatcagcagtgaaagtgaaaagagcagtccagaaaacatccgatttaatagtgttgggtctcccatggaaaacaaccgaacaggacctgaaagagtattttagtacctttggagaagttcttatggtgcaggtaaacttcgattgcatcaaacagtttttctttaccagtgaatgagtatctagcatttatttattggtataaatagagatggggtatcactatgttccctaggttctggcgtcaaactcctgggcccatactgtcctcctgcctcgaccccaatgtgctgagccaccatgcccagccacaatcttgttacctttcttttttttttttttttttggagaccaagtctcactttgctgcccaggctggagtgcagtggcacgatcttggctcactgcaacctccacctcccgggtttaagtgatttctcctgtctcggcctcctgtatctgggattacaggtgcccgccatcatgcctggctaattttgtatttttagtagagacagggtttcacccgttggccaggctgttcttgaactcctgacctcaagtgatccacctgccttggcctcccaaagtgctgggattacaggtgtgagccaccgcgcccggccacattcttgttattttaatggcactgtcctttctgttacacagatgatacttccaatatttgttatatttatacatatatgttgtaccctatgttattgcctttgatattgtaaaatcctactgttgcatgaaggcttaagggaagtaggtgacaatagcttttctttatatattaaactaatgggaggtttttccatttcatttaaaatttgtaaacattaaatttagtttatctttgaattcattctaagacattctgttaaaatcctgttgtggtggctcatgcctgtaatcccagcattttgggaggctgaggtgggagggttgcttgaggccaggagttcaaggccaccttggcgaacatatccagactcagtttctcttttttcttttttttttgagacggagtcttgctctgtcacccaggctggagtgcagtggcatgatctcggctcactgcaagctccgcttcccgggttcatgccattctcctgcctcagcctcccaagtagctgggactacaggtgcctgccaccacgcctggctaattttttgtatttttagtagagatggggtttcaccgtgttaggcaggatggtctcgatctcctgacctcatgatctgcccgcctccgcctcccaaagtgctgggattacaggcgtgagctactgtgcctggcctctctttttttcttttctttttggagacagggtctggctctgtcagtcaggctctagagtgcagtggtgcaatgtaggctcgctgcaacctccacctcctgggttcaagctattcttgtgcctcagcctcccaagtagctgggactacaggtgcatgccactacacctggctaatctttgtattttttgtagagacagggttttgctgtgttgcccaggctggtcctgaactcctgtgctcaagcgatccaccctcctcagcatcccaaagcactgggaatacaggtgtgagccaccgcgcctggccccatctctcttttttaaaaaactcaaaaacatttctgttgtataagtgagttttgctctgttgttaacacagtatggattcaatattaacctccttgtttttactgttaagactaacttggtttaagttttaagccactgcatccagttgaaaccattcaaattgttttctaaggaactatgatttgggaatggagtgtgtgagtatgtgcacttttagagtaaacttgtatcatcctttctaggtcaagaaagatcttaagactggtcattcaaaggggtttggctttgttcgttttacggaatatgaaacacaagtgaaagtaatgtcacagcgacatatgatagatggacgatggtgtgactgcaaacttcctaattctaaggtacttgcgtctgtgctttgggaatttttgccaacaaacttccttagaggattgtaagataaaatgttaaacacacttagaaaagatagcggcagggtgtgttcatgaaatccttttgtcttgttgaagtctttggcccttagtgcatgctgaatattttatgcttgtttgaaatatttagtttattacttctccaaactaaacctttgttcattttgttcttccttttcgctatggatggaaaagagaaaaggttatttgtcaagttaatagtttcttacatagttatatgttaaaacataaagagaatcagaatacatacattaattgttataaagacctaactttttccaagcaaacaaataacattggcttatttggaacatcatcatctttgccaagagattgcttatttattaattttctcaaatccaaacacagtcatgtatcacatggcaaagttgatcagtcagcagcagacctcgtgtacagcagtggtcccataggattataacactgtttttactgtaccctttctatgtttagatacacaaatacttaccatcatgttatagtcgcctacagtgttgagtacagtaacttgaaagtttgtggcctgggagcaataggctataccatctagcctagatgtggggtaggctatgctatctgggtttatatgatgtttgcacaacgactttttttttttgagagagagagtctcactctgtcatccgggctggagtgcagtggtgcaatctcagctcactgcaagctctgcctcccgggttcacgtcgttctcctgcctcagcctgccgagtagctgggactacaggtgcccaccaacacgcctggctaattttttgtatttttagtagagatggggtttcaccgtgttagccaggatggtcttgatctcctgacttcatgatccgcccatctcgggctcccaaagtgctgggattacaggtgtgagccaccgcacctggccctttttttttttttttgagatggagtttcactcttattgctcaggctggagtgcaatggtgcaatcttggctcactgcaacctcctcttccgggttcaagtgattctcctacctcagcctcccaagatgctgggattacaggtgcctgccaccacacccggctgatttttgtattagtagaggtggggtttcaccatgttgaccaggctggtttgaactcctgacctcaagtgatccacccgcctcggcctctcaaagtgctgggattacaggtgtcagccaccacacctggccacgatgatgaaattgtgtaatggctcatgatgtatttatatccatcattatgtgatgcatgactgtgtacttttgtaacttaaaacgttactcttcactgaagccttacaagaaaaagaaatgctgatggaaaaaattaagggtacgtctactttttaatggttcactgctatccaaggcgaatgattttgttatatcccttaccttaatgtttttttcattgttcataacatatttctgagtttttttcttccttttgatttgatcagcaaagccaagatgagcctttgagaagcagaaaagtgtttgtggggcgctgtacagaggacatgactgaggatgagctgcgggagttcttctctcagtacggggatgtgatggatgtcttcatccccaagccattcagggcctttgcctttgttacatttgcagatgatcaggtatttttctccttaacgatatgtcccggccgggcgtggtggctcatgcttacaatcccagcactttggaggccgaggcgggtggatcacgaggtcaggagatcaagaccatcctggccaacatggtgaaaccccgtctctattaaaatacaaaaaaaaaaaaaaatagctcggtgtggtggtgcacgcctgtggtcccagctactctggagcctgaggcaggggaatcgcttgaacccaggaggcggaggtggcagtgaactgagatcacaccactgcattccagcccagtgacagagtgagactctgtctcaaaaaaaaaaatatgtcccaggtaattaggtaatttctcttgaacattgcccatgcagctaattgctattcttagctaagttttctgaccttgtaagacgtagggtgtatgggcctagatgtttgtgatacctgtatctgatatcacaaatacaacattttaagaaatctaaaagtaaatatgcctttagataattttcagtatgtggcatttgggaatgttatatactttttttttttttttgagacagagttttgctcttgttgcccgggctggagtgtgatggcgcgatcttggctcgctgcatcctccacctcatgggttcaagcgattgtcttggctcagcctcctgagtagctgggattacaggtgcctgccaccacgcctggctgatttttttgtgcttttagtagagacagggtttcaccatgttggccaggctggtctcgaactcctgacctcaggtgatctgcccatctcagcctcccaaagtgctgggattacaggcatgagccaccacgcctggccagttttttgtatctttagtagataacggggtttcactgttttgatctggctggtcttgaactcctgacctcaggtgatccacccccctcagcctcccaaagtgctgggattacaggcgtgagccactgctcctgctcccggcccattttttaaattattattttgagacagggtctcactctgttgcccaggctggtggaacacagtggtgtaatcatagctcactacaccctagaactcctgggctcagcctccagggggaggatcctccagcttcagcctcccaagtagctaggacagatgcatgccactacgcccagctaatgtggcttttttgtggttttttttgatagaggtggggtctccctgtgttgtctaggctgccaggctagtcttgaactattggcctcacacagtcctcccaccttggcctcccaaagcgctaggattacaggcatgagccaccatgcccagcctatgtcttttgaaaatcgactgaaatatcactgctgctgttaataaaactaaaagctgtattgggggtttaaatgaaatgagtgttcattgcttatttttcctctggctttagataaattaatgcttgtaatctaagttttgttgctactttaaatatatgaatcagtggtttaatcttctttgtttacatcccttatttcttatagattgcgcagtctctttgtggagaggacttgatcattaaaggaatcagcgttcatatatccaatgccgaacctaagcacaatagcaatagacagttagaaagaagtggaagatttggtggtaatccaggtggctttgggaatcagggtggatttggtaatagcagagggggtggagctggtttgggaaacaatcaaggtagtaatatgggtggtgggatgaactttggtgcgttcagcattaatccagccatgatggctgccgcccaggcagcactacagagcagttggggtatgatgggcatgttagccagccagcagaaccagtcaggcccatcgggtaataaccaaaaccaaggcaacatgcagagggagccaaaccaggccttcggttctggaaataactcttatagtggctctaattctggtgcagcaattggttggggatcagcatccaatgcagggtcgggcagtggttttaatggaggctttggctcaagcatggattctaagtcttctggctggggaatgtagacagtggggttgtggttggttggtatagaatggtgggaattcaaatttttctaaactcatggtaagtatattgtaaaatacatatgtactaagaattttcaaaattggtttgttcagtgtggagtatattcagcagtatttttgacatttttctttagaaaaaggaagagctaaaggaattttataagttttgttacatgaaaggttgaaatattgagtggttgaaagtgaactgctgtttgcctgattggtaaaccaacacactacaattgatatcaaaaggtttctcctgtaatattttatccctggacttgtcaagtgaattctttgcatgttcaaaacggaaaccattgattagaactacattctttaccccttgttttaatttgaaccccaccatatggatttttttccttaagaaaatctccttttaggagatcatggtgtcacagtgtttggttcttttgttttgttttttaacacttgtctcccctcatacacaaaagtacaatatgaagccttcatttaatctctgcagttcatctcatttcaaatgtttatggaagaagcacttcattgaaagtagtgctgtaaatattctgccataggaatactgtctacatgctttctcattcaagaattcgtcatcacgcatcacaggccgcgtctttgacggtgggtgtcccatttttatccgctactctttatttcatggagtcgtatcaacgctatgaacgcaaggctgtgatatggaaccagaaggctgtctgaacttttgaaaccttgtgtgggattgatggtggtgccgaggcatgaaaggctagtatgagcgagaaaaggagagagcgcgtgcagagacttggtggtgcataatggatattttttaacttggcgagatgtgtctctcaatcctgtggctttggtgagagagtgtgcagagagcaatgatagcaaataatgtacgaatgttttttgcattcaaaggacatccacatctgttggaagacttttaagtgagtttttgttcttagataacccacattagatgaatgtgttaagtgaaatgatacttgtactccccctacccctttgtcaactgctgtgaatgctgtatggtgtgtgttctcttctgttactgatatgtaagtgtggcaatgtgaactgaagctgatgggctgagaacatggactgagcttgtggtgtgctttgcaggaggacttgaagcagagttcaccagtgagctcaggtgtctcaaagaagggtggaagttctaatgtctgttagctacccataagaatgctgtttgctgcagttctgtgtcctgtgcttggatgctttttataagagttgtcattgttggaaattcttaaataaaactgatttaaataatatgtgtctttgttttgcagccctgaatgcaaagaattcatagcagttaattccccttttttgacccttttgagatggaactttcataaagtttcttggcagtagtttattttgcttcaaataaacttatttgaaaagttgtctcaagtcaaatggattcatcacctgtcatgcattgacacctgatacccagacttaattggtatttgttcttgcattggccaaagtgaaaatttttttttttcttttgaaatctagttttgaataagtctgggtgaccgcacctaaaatggtaagcagtaccctccggctttttcttagtgcctctgtgcatttgggtgatgttctatttacatggcctgtgtaaatctccattgggaagtcatgccttctaaaaagattcttatttgggggagtgggcaaaatgttgattattttctaatgctttgtagcaaagcatatcaattgaaaagggaatatcagcaccttcctagtttgggatttgaaaagtggaattaattgcagtagggataaagtagaagaaaccacaaattatcttgtgcctgaaatccattaagaggcctgatagctttaagaattagggtgggttgtctgtctggaagtgttaagtggaatgggctttgtcctccaggaggtgggggaatgtggtaacattgaatacagttgaataaaatcgcttacaaaactcacactctcacaatgcattgttaagtatgtaaaagcaataacattgattctctgttgtacttttttgtaactaattctgtgagagttgagctcattttctagttggaagaatgtgatatttgttgtgttggtagtttacctaatgcccttacctaattagattatgataaataggtttgtcattttgcaagttacataaacatttatcaatgaagtcatcctttagacttgtaatcgccacattgtttcattattcagtttcctctgtaaagggatcttgagttgttttaattttttttttctgcatctgaatctgcatgatttccaaaccctgtaccatctgaattttgcattttagcacttgcactattactcagcagcagtaacatggtaacacttaaaatggtactcggggacctccaaagactaaactgacaagccttcaaggagcccaggggtaagttaacttgtcaacggcatggtttaatcccttctttacacttgtgtaaatttcagttactggtcatagaaggctttcaatgttgagtggccttttattaacatgtttatggtactgcatagatacgggtatttattttaccctaagaagattttgaagtttaaaagtacttaaactatttggcaaagatttgtttttaaaaatctatttggtcaatctaaatgcattcattctaaaaaattttttgaaccagataaataaaatttttttttgacaccacagtttagtgtctggagtcttactggaaaaacacgatttctttttatatgtgatatacagatgctggaaagttacctttaaaaattgagtctctaaagaaaaaagaaaataataaaaattgagtctcaagaagttgtacttcatatgcacaagagaaatgaggccaagactcacagtaagcttttacatggaatggtaacttttagttagactgaaaaacttgaatgttagctattaaaaccttttaggaaggaatagccagctaaaaccaaatgagatttttaaagttaaatcagcacttaagttgtgtccttagtaggaaaaagtaggaagttaactactccgtaatccaagagataatgtgtaacagtaagaatgattttgttgttgttgagtatgagcaaagtagcccctaagtgtgtattagggttctgtacttaactgttgtgtgatgtgtgcttttgttaggcatcactgtgcccaagtatttcatgttcattgtaaagaggaaaaatacagatttctctataatgtcaccacttatttctaatgccacttttcatcttgtggaaatgccatgttttgattcagtcttctgaatttgaacattattcaggttatttccaattgctgggaatatccttactgctaaaataaattcttagcattggaattgctaggtcaaagattatgcatgctttttaagggcttttgaaatgtattgccagtctgtggcctgccaccctccctgaacatgcctggtcttgcttaaaatgtattgccaaatagtccttgggaagtttatgttgtctttaacaatgtgaaatagtactactattcacgttccttttgtctgacaatttgataagtgaataattgtatcccaccattctgtagtattggtttttaacatggaaattttagtcaatacctgggctgaagtatcagtgtttccaacctacctacccaaaaaaaggattcaaggttattcctcaatcagtactgccataatatataaagcacttacagagatcaataagaacaagtttaaaaacaaagagcatggacaggcagtttacagaaatgccaacagccagtatgaaaagagactggctttttaaggtaatgaaatgtaatttgagcagtgacattacactgggtgggcaaagatgactgtcactctcgtggtttatgtccccttgagtcaatgggtaaggctggaattaaactggcaagtggagaaatgacagcagcctcacctggagtctgtttttttgggtggagcaacaactgccatgtccacagtaatgatgaatgcttctcgagccacgtcgctgccaaggtcttcacaggcatttctaaaaatgaagaatccttgactgcagacacgcaagttaaaaatcactaattatgttctcgatccagggaatatagttaataacttttgtgtagactccatactgacctgcttccccacaattcatggaaccccaggacactattcctcccacaaaccacctctctgtttcactatctagaaacaccagtgcccctccgctgtcacctctgcagctgtccttgcccccactttctaagccagcacaaagcatgttagcagttacacttccccttggatagggtggcttttcatatgcagcagtacatttttgatggtcaacaatcggtatgtcgacatacattagatttctagcaagaaaacccctttgggttaatccccatccagatgcagttccaatgtcatctgtcctcataaaggattcagcttcttttcttggcagacaaataggcgtgatgttgctattgattacaactttgttattcaatttaatcagtgctatgtcattgtcaaagccagcatcatgagtataaccttcatgtataaaaacagcttcagaccaggcttgtgtataatgaggtgatagtcttttcagggtgcccattcgaatgtccagggcggatgcatcatgtttttgctcataga

SEQ ID NO: 779 - DNA, 420663 bp, Homo sapiens
tctctgtgttattctgattggataattacgattgtttcatctcccagtacactgattcattcctctctgttcctccactctagtgttgagtccatccattaagtttttattttagctattatattttgcaactctagaattttcatttggttcatctttacaatcttctatttatttgtcgaggctattattttattagtttcaagtgagcttatagtttctcactgaagcattctaaaactcttagatggctactttagaattttgttagataattcaaagatctttgttattttgatgtttacatcagttgattgtccttttctttctttttttttttttgttggtggggaggtgttggggggaatagagtcatgctctgtcatccaggctggagtgcagtggcacaatctcggctcactgcaacctccgcctcctgggttcaagtgattctcctccctcagcctcccaagtagctgtgatttcaggcacatgccaccatgctcggctaattttttatgtttttattagaggcagggtttcaccatgttgaccaggctggtcttgaacttgtgacttcacaggatctgcccatatcagcctcccaaagggctgggatcacagacgtgagccaccgtgcctggccaattgtcctttaattaaaaaacatatatataggccaggtgcggatatataggccgggtgcggtggctcatgcctgtaatcccaacactttgggaggccgaggcggatggatcacaaggtcacgagatcgagaccagcctgaccagcatggtgaaaccccgtctctactaaaaatagaggcgcgtggtggcacgcgcctgtaatcccagctactcgggaggctgaggcaggagaattgcttgaacctggaaagcagaggttgcagtgagccgagatcgcgccgctgtgctccagcctggtgacgaagtgagactccgtctcaaaatatatatatatatagtattagatctgcccagttcttgatctgatgagcaattttaaaattggaaacctggtcattttcaattttactttatgagactctggattgcattaagcctctttttttgccaacttcttctcataccactcaagcaaatatgtgtgtgtgtgtggggagggtgtgttattactgccaggtgggggtagacatctaggtttctcttaaatgtccattgatacctgaggggtaagggctccttattactgttagggaagggtgggaggttcagctacccatgaggcctccactgatatctgcctggaagggaggagtaggggtgcctcactaaagattctctggtgtcttccactgacaccatggtggggccctcattactaatgggtggtggtgaagacctaactctctactaggcctccttaatatcaccctagtagagaagggatgggcagatcattactgccaggttgaggtggaaattcagcctccctacatggtctctactggcaccaccagggaagcaggcttcattactgtcaacagaaataaagacctaggctccctactcaccttcctctgatatcatcccagcataaagattggggtgcctctttcaactttgctttatgtattttgaggtcatttttattaattttcactattcgtatccctaaaaatgctcttttgaaaaattttaatgtctatttatttttatctaatttaaatattttttccctgatctgtcaatatttacatttttgtccatttctatttattaaaattttaaattttttgaacatctgtctaccacttatttgtttgtttgtctgcttatttttgagacaggttcttgttctatcacctaggctggagtacaatggcgtgatcacagctcactgcagccttgacctcccatgctcaagcgattctcccacttcagcctctggagtagctgggactacaggcacgtaccaccaggcctggctaatttttgtaatttttgtagagacaggtttcaccatgttgctcaggctggtctcaaactcttgagctcaaatgatccgcccaccccagcttcccaacgtgctggagctacaggcatgagccaccatgcccagcccacttaatttatttcccatattttctatgtgtcttcttaatccattctctggattgtttttgtatttgggtgtttatatgacattttcatatacttcatttcccttcaactctcattatgttgacattatccagattttcatattttaagattattatggatacactattttattttcttctatcttagtaatgctttaaagacaatagcagtgataacaaaaagccaccaaagtattaaatcacttttacttcatattttcatactttttaagattattatggatatacaattttattttcttcttagtaatgctttaaagacaatagcagtgataaaaagctaccaaagtattaaatcacttttacttcatatatttattgcagcttctcctgaatttgtctcttcacttccttaagtgctttatctaaaactctttttgataatgctctttgagtggggatccttctgaggtcttatgtatgagagaatattcttatctagccctcatatttaaatgacagtttgggtagatacaaaattccaagttctaaattatttttcttaaatatttttactaccactattttttttaaattgagacagggtctcactctatcaccccggctgaagggcaggggcactattatggccagtggctcactgtggcttggacctctccgggttcaagtgatccacccacctcaaccttctcagtagctaggactacaggcatgcatcaccatgcccggcaaaaaacaaaaacgaaaacaaaaaaacaaaaaacaaaaataaaaaccactatttcttaaattgtttttcaaaaactatcatatcaatctgatcctgttcctctgtatgtaatctgcttttttagaactctctttttcttcaaaactattcaattgaaatatgtttccttgtaggttttctttatctgttattctaagggctctttcaatttgaagtctttcttccttgtattttaaattgtgggaaatgtattccttccatgttttcttttcattattacttcttttattggactcttattagccagaacttataaccattatttctttcctttgtatagctttttaaaaaaaatttgtaatttgtttgtactttccttcattctttcctcaatcctttcttccaattctaatttatttttcagttgtattcattctgccatttatctcattacagttttatttcagctatcatgttttttacctaatatagctgcttgagtatattttttattcttatttcatattactactagtttcttatgtcttagaatttttattaggctaattttaaatcgtttgtctttctaacaatgctgcttctgatgaactatgtaatccagtgtttgtttttcctttgaaatagttgtgctcctgataagacctattagtttggactgtgaactcatctccccacgagggcatcaggcagtgtacgtggggagaagccggatttcagccctcatcagagtatttagtatgggggtaggggtgggatgaatgagacttagtgtggaaagttttctggtggaggccccagaaaaccaaagttaatcattcctcgttccacagaacagctcgtcaagattttactgtttgcccttcttgggataccatattaagagacattccgttcgggtgcagtggctcacacctgtaatcccagcacttggggaggccgaggcgggcaggtcatgaggtcaggagtttgagaccagcctgaccaacatggtgaaatcccatctctactaaaaatacaaaaattagccgagtatggtggcacgtgcctgtaatcccagctactcaggatgctgagccaggagaatcgcttgaacccgggaggtggaagttgcagtgagctgacactgcaccactgcactccaacctgggcgaaagagggagactccgaaaaaaaaaaaaaaagagacattccaatgctgtaaatccccagatctgcagattttgagatggaaaaaaggaggtagaaaagcgatcctagtttagtgaatctacacctgttcttctcagtatctcacaggatcaagacttttatgctgccctgctcttatgtttgaagcatcagagtcattgcaagtagaaggttgggtattattcgtcccaaagcaatgtttggaaaagtaagagcaaaattcctaaattcccttcctatgttaacctcccacagaagtgctgcaccacccctggtctcagatatgtctccccctaaggtacacacacacacacacacacacacacacacacacacacaacttcaaaacagctactattaccccaggaacttcccacaattttctccataatttggtatttttcctctatggccataagtctcaattttggctgtgtattagaattacttggggagattttttaaaatctcaatgcccaagccacactcctagaccaattaatttagaagttcttaggatgagactgagacatcgttttttttcttttttctttctttctttctttttttttttaaccatcccaaggtctttatttatttagtttatgcctatcatgccatgaattcatggggaatagattctagcagctcgagctccttttctttgggtctcagaaaatgtgcttctctgggcagagcaggctggtttttcggttgaacctagatccctttctcttcggcttccttctttttctgatcattttcctcctaccatttcaggatgctatctcagctcttagagtgcttaatatgctcaatatgtacattaattctcttggcaagaatctttctcttatcttgtttgtttacaacaatgccaacagcatgctgggttacacagtagactcttccagctttgccatggtaacacttgtgcagcattccttttcgaacagtgcccattctcttgatgtctacagtatcacctttcttgtagattggcacttatgcggccaaaggaacaacaccatgttttctaaaaggctggagaaaataccacaggtgcctctcctctttcccttcatcttcatcattttgacaaattactcaaagatggagggtgcagttgaaagccagccatcattttttaaaacttctcaggacattgtaacatgcacttgggttgagaactgctactcgagcttctccaggaggcccttggaggtaggaaccagcatttgggctactttagcatcttagtagaaactgaaaccaaaaatgatctcccatggccaccatggccaaacataacggtagtttctagctctctaacctctctccctgacatctccacagcacttggcctgccctcttgagagtcttttctttttttctttttcttttctttttttttttttgagacagggcctcactctgtctcacaggctggagtgcaatggcacattcttggctcactgcagcctctgcctcccgggttctagcaattctcatgcctcagcctcccaagtagctgagattacaggcatgcaccacaatgcccggctaacttctgtatttttagtagagacagggttttgccatgttggttgggctggcctcgaattcctgacttcaagtgatctgtccatctcggcctcccaaagtgctgggattacaggcatgagccaccacgcatggccctgccttcttgagattcttgctgagactgtacaaggcgttgactcttgtctaatcttttgcactgctcctctgtctcctttcccatcaacattctaaagttggctgcttctcagtattcataatccatggttcctctttctctccaagaactctgccagcatgtacatttataaaaccacatctccagccctaaccactctcatgtgttttttctctaatacacctccatttggatgtcatgctggcatctcaaattcaatatatctaaaaaggaactcataatttctgcataaaacagcacccccttacgacttcctttatcaatctagctgccattttcaggatcatttttggttcttccttcaacagtctatttccagtgttcagttggacttttctgtgcaatatcacttctacgtaattaacatctttcaagttcagatcctaacaatttcctgtctagattattgaatcagcctcttgctcaatatccctcactttgttactccctaccacaaggtcataaatacaccattgtcagtttaatataggataaaattgcaatcatgtgactcacaacttattgctcaaaacccatcaccaaagtacaaagcccgtggcatccaatgcccttcagtatggcccaaactatctttctgaccatgcttgcacctattcctccacactagatgggatgttttttctttttgaaatggaaagaacataaactttgaatcagacagatttggttttaaattccctgctacttctaacttggataagtttctaaaacaacatgagcctcagttttcacaactaaaaaaacagaaacaaatatgtaaaatattataaattagtaaaagaaaaaaggtgaataaaacagagacattaatagctaatagaactgtttcatataaattctagtttttttttttgtttttgtttttgttttttttgagacggagtctcactctgttgccccaggctggagtgcagtggcacaatcttggctcactgcaacctccacctcctgggctcaagccattctcctgtctcagcctcccatgtagctgggattacaggcccctgccaccacgcgtggctaatttttgtatttttagtagagacggggtttcatcatgttggccaggctggtcttgaactcctgacctcaggtgacccgcccgccttggcctccccaagttctgggattacaggtgtgagccactgcgcccagcctaaattatagtattatgttttttgttagatcctaaacttccctgctgcacctggacttcgttgttgttgttgttgttgttgttgttgttgttttgtgccttttttgttttggtttggtttttagcctttgtatacagctgtttctcctggctatgctctatatcaagggttgacaaactatagcccacagacctactttgggcttaaccgagacatacctattcatttaagtattgtcattaagtatgctacaacagcaaaggtgaattattgtgacagagaccatatggcctgcaatgcttaaaaaatttgctatctggccctttacagaaaaagtttgcccacccctgctctagcctctctttctttactcatgctatagtatctccccaggtattctgggtttaaaatatgtccacaaatcctccaacaaaactaacttcaaaaggtggagcccccatccccttgaatataggctggaattcgtgacttgcttgcaacaaataggacatggcagaggtgtcagtgtgtgacttcttaaactaggtcataaagggcactgtggcttccactttgctctttttagatcactaattctggaagaagccaacccccatatcataaagacactcaagcagactgtggcgagtcccacatggagagaagctgaggcctcctgccaacagccagcaccaacttgccaggcatgtgggagccaccttagaagctgatactgcaggcttggtcaatcctttagaggaacttgctgacttgcaggcccagtccacatcttggctcaaacctcagaacagaccgtaagccagaactatctggctaagccacattccaaatacccaacccatagaaactgtgaggataataaatacttaatgttgttttaagccactaagcttcaggttaatttcttatacagcaattgataactaatacataagaaaaccttcatttaccatccactgaccaaagactcaaatatacaaccacagcctggacctctcctatgacctcataccttcatatataactacctattccacatctgttcctagagatctcaaaggcatctaaaacccaacatgtgtgagactttggtctctttccctcagacaggatcttcctccaatattccctatcccagttaatggcataatgagcttaatccataaactacaactctggccttctgtgatacttctttgtccttcacaccctatattcaatccattatcaatttcagccaaattaactaatatgtagtttttaaatcaggatgttaccctccagcagtactatagagatgctctttcattgtctctggcatctgctgatcatgagaagtcttctgtaagagcatcattctttgaaggtaatctatctttccttctgatagcctttgatgttttctgaataaccttgagcctaaacctgggtttgcttttattcatcctacctaagacttggtgtgatctttacaatctgaagacatatagctcttcaactctcaaaaaactccatcgtctccctgaatattgccttttgattcttgtctctattccctgtataacagttagggtccagtcagacacaccagttatgttagtagacaaaaattaacctaaagaactgttggccgggcgcggtggttcatgcctgtaatcccagcactttgggaggccgaggcgagtgaatcacgaggtcaggagatggagaccgtcctggctaacatggtgaaaccccgtctctactaaaaatacaaaaaattagcaggatgtggttgcaggcgcctgtagtcccagctagtcgggaggctgaggcaggagaatggcctgaacccgggaggcggagcttgcagcaagccgagatcgtgccactgcactccagcctgggccacagagcgagactacgtttcaaaacaaaacaaaacaaaaacaacaacaacaacaaaaagaactgttaatcagggcaaaaagagggcattgaggcatggaaggaactgcagaaggatgctaccccactagggttaagggactaaaaggatgagattagaattactaacatttagaaacttggaggaagggccctgcagaattggaattaatacctttgagcagagtctgctggcctgttggtactagcgtttctgagggatgcaacgaggttggttatgcaagttttggaacaactgcaaatcgaaataactgctgctaccaggatgaattccactaccaagacaggcattaaacatcattcctaaggcactcacctactctcagaactcaatagactgaatcttcaacttgcaacaatggctttgtttttgacatgcgtcaatttcccttttgctttccagctcagctatatattttaagtgtgtctatgtatttgcagcagatagaagtgattcctttcaccagcttagtcatttgtcaagagtttctgtgcacttgtcttcatccctgtagggcattaccctaacccaaaacattatcatttcttccccagactaccagtaccatcttctaacttgtctacctgccttcattctaacatgtccaccatcttttctccaccctgcagcaaatgttttgtaaacaccaatctaagaacattatctcttggacgggcatggtggctcacacctgtaatcccagcactttgggaggccaaggtaggtggatcacctgaggtcaggtgttcaagacagcctggccaacatgatgaaatcctgtctctactaaaaacacagaaattagctgggtatggtggcatgtgcctgtagtcccaactactcaagaggctgaggcaggagaattgcttgaacccaggaggcagaggttgcagtgagtcgagatcatgccactgcactgcaacctgggtgacagagtgagattctatttcaaaaaaaaaaaaaaaacccattgctcttacaataaagataaacatgttgcatatgtccaacaaggccttgtatgtactgacccagtgccatcttgcattgtgctccttcttttctgtgtttcctggccactctggcctcctttgctattttcaaataggacaaagcctttgcatatgctgatgctcctatctgcatcagtcctcttcccaattctgtccatttaatcaccactcatcctacagaaaacaagtcaaattcctccaagaagccttccttgccatcaaactaggtcagcactctatttatatggtctcatagtcttagatttcttttacacactgtgttatggattatttggtaaagcctcctctttggggttataaactccaaaagaaaagaggcatagcatgctatgctcctagcaagagtttctgccacacaataaacatttaatagctctttatagaatgaataaatgagccatattgaatgttgattaaatttcaacaagctttccagaaatcagcctataatgattatccctttcagtggacttctgacacttgtaattcatctgacatatttcctttcttttctgccatgggcttggtagtctcagttagcatatcattgattaaggtcaggggcctttatgttatttttgaattcccagtgtctagcacagtgccattgaaatagtatgcaatcaacacatttttatttttcatgataatgattaagaacttagtgccattatagttaatgtagtaaaattttgtgaattcaataatgcccctaagtagtatacaactttgaaagcacgctcttctcaagtaattaaatgttataattatctaacacattattattctatataaaatttcagagatgttagttcattattttcagccctttatattttaaattaatgatatagtaatttttaaaaaacaaacctttgctttactttagctgaagacacaaatgtcttcagatggtgctcaaaatggtttaaattacacagatgaggtaaacatacagtgaaatcttagaaaggccccaaagaattccctacgaatgatacatgagccaagggcatgacattcaccttggaggatctttctccctttgaataagtttgataaaatgcctttttttttccactttgaccttaagcacttagaaatcatttgttttacaaaagccccgtggtccaagattatagcaaccagaatagtgatgtctgtcttacatttcaattgtgcatggttcaagactttagtttaagagagtgattttacataaaagtttttagatagatttcactcctgtgcctttgttggtctcttctgtacttctacgaagaacagctttgtagtttctacgctggcttcaagcacaatactatagctccacaaccttgtccaactgttagaatcatccagttttatagcagctgcacacaggcgttcactcacccgggttctgagtttcagcaatcttcttatctttgccatttttatgaaataagtttgttgtattttagcacccaagccccatagtatcttataccttactttcaggaagaggctgtcaaacatctcctggtattatgtttatgatctttgccaccaggtttttaggcttgttggagcatgatttacactgcagacctccctaaatttagttaactttcattcgtcatcaccatccagatattttaatttggtatatccaggaggcataatagccaatgctttgccagagagctataaatattggtatgaattttacatttccacttgacagtaggagtgtctcaattgatagtgatcttaggacttcttgtcagcataccaaatatatcaacaggccttgtcatgaattttccagacatttgtagaatcatgaaagtttttttcacattgaaataagaaagtatcacacacacaaaatattattttttataagattgttatgtaaaatataagattgtgaattttgcattgcatacaatatttattacatgggaactttgtgcatttatgaaattatttactacttatttataaatgtataaagaaatatttagcaacaattgtgttctcaattcttttgaagtctgtcgacttatgtctatttttctagaggattattccttgtttctgtctagtctggcattttactacatatgcactcttttcatagaactagtgatgtccgtttgtcagcctcaaatgcatacaaattgctatcttaaaccagatgagtgtttttgcaaaacaaagacatacaaaataatggttcttttgtagaaattgatcgaaatattttaaagcttccttcaagggtgtgaagttttggttaattctggcctagaaaaatattttgcacatcaacctagggcatgatcatacttattttatataacatcatgcctacagaatgtgttttccaatgaccatcactaatggacattatctggtattttaatttttttccaaggcttttctgtgtataatgaaagacaggaggcccactaaacacaacatttaaaaataagttaactctatattagtgaaaaaaagattattaaaaagattaagtggtacatcaattaaaaaactttttaaaaagtttttttaaaaagaattaaattctgtcaaattcagcctgaaatttgaacacagaaataagaacagcaggattttcattggaagatgcatcattgtgatgttagtggccaaaccagatgccaggaaagcagtgcctctctcaaattcccatatgtacacatgagagttcagccttccttcttaatgtcatccagttcctagagaagttttgctagtgttccttctgaatatacggggcaagagaggaagtcaaggtcactatcaccaccaagtcctgaagccaggtagttgtcagccttgaaatgatcctcattaaaaactagtggcttgaatgtcctctatgaagctgttctttgtttgtttgtttgttttttagacagtctcgctctgtcgcacaggctggagtgcagtggcgcgatcatggctcactgcaagctccgcctcccgggttcacgccattcttctccctcagtctcccgagtagctgggactacaggcgcctgccaccacgccctgctaattttttgtatttttagtagagacagggtttcaccgtgttggccaggatggtatcgatctcctaacctcgtgatccgcccgcctcggcctcccaaagtgctgggattacaggcgtgagccactgcacccggccttgttttgttttttgagatggagtctcactctgtcacccaggctggaatgcagtggcatgatctcggctcactgcaactgccacctcctgggttcaagcaattgtcctgcctcagccttccgagtagctgggattacaggcacctgccaccactcccagcaaatttttgtattttcagtaaagacgggggtttcaccatgttgggcaggctggtctcgaactcctgacctcaagtgatccacccgccttggcctcccaaagtgctgagattacaggtgtgagccactgcgcccagcctatgaagcctttcttgactcttctgaatacacgtggccactgtcttcctgcattgccattgtaccctgtggaagccattattgggacatctatgagactttttttcatgtatgtatatattggtctgtttcctctactgcaccataatgcctgcattcccaggaattctatggcttttctctctatcactccacacaatatctagcactcagtcaatgctcaatatgtttgttgacaaaaacattcttctggacatgttcatagaatgaacacacagccttcagcagcagtacactcagcaagtaactgtgaaaagggagccattggagttaccaaattagaaccactcattttgagcaaaaaatctctgactcaatttgaggcagggctgcaaaagttgaacagcaacattaaccattcacccagcacctcaagccttcacactgtaatcacatcgattagctgaacattggcaccaaagaaagggtcagtatattttttgttcaagcttttgtccatatacagaagctggtgcccgattatttcagtgtttagtgattttaattttctgtgaaatttgcctacacaatttgtgcttctcccagtttatgtgctctgtactgtcaaatatgatacagtcagaaagcacattcctttatcattttcctcttacaaaaaagaaaactggaaaaattatattatttgcctttaagtggaaagacatttcattttccagatggatgctggtacttcaggaaatattagagatatcttgttgaaatttttagaagtgatcctgttatcgtaccttttacactcctggtcaagctgtcatcactaccaaagcatttccataactacctacatatgcccatttctttgagaaagaagaaacagagtgatgctaactttcctgaagtttcatacacgtttgaatttttatatgtcaagtctcagattgtcaaaaattgaagcatggaagtttgctcctggaacaccaaacatatataaaattccacctgtgatgtcctcaactttttaacagctctaactacttcaccaacctctaggaactttttttcaacaggatatagtattcacagacaagaaatgaaggcgagattgtttctagataaatttagctggggaatatggaaaatatgatctaataaaggaaacctccaggtaagttcaagatagtgaatatatgggaattggaaaaccgattgcccagattcttcctttaagtagtggttgtgataaaatacattttgatttctatttctaatgaaaatgtgaaacagacatctatttttccatcccaactgggcttcctccaaatatgctgccttctccctaatgagttggaatagtgtgcaccataaaatagtacaacacatcctgaaatgctgacatttcatttttaattgaaatcaaatagaaatagttccactgggaaacaagaaagtaaagcaggcttttgatagaaattaataggaaagggacggaaatactattctctgtcataaagtagtccactatggaaggctgccagtccacttgcctgaatctgagtttatctccaggattacattcagtgaaaagaacacatcttatgaaggtggaacgagaaatcgtatttggatggatatatcaaaggaaagaaataaaaaatacttcctttcttctattttttaaaaatcataggaatgtagaggtcaaggaaaactgttgaattttactgcaaaaacaatgatagcaaaacaaaagacttcatatcatcaacaaaaatatttacaaaaatatatcagaaaatacattctttgggaggtaaaataaacttacattgctgggactaaaattctctcatcggtgggacaactttcttttaaaaacagttttatggcaatacttttaacagtggtacttttaagagttgtagcttggctgggcacagtggctcacgcttgcaatcccagcactttgggaggccaaggcgggtggaccacaaggtcaggaaatcgagaccatcctggccaatatggtgaaaccccgtctctactaaacatacaaaaattagctgggcatggtggtgtgcgcctgtagtcccagctactcaggaggctgaggcaggaggatcacttgaacccaggaggcagaggttgcagtgagccgagatcaggccactgcactccagcctgggcgacaaagcaagttcccatctcaaaaaaaaaaaaaaaagttgtagcttgagcagcaacaataacattaataaagattaacatttgtataactgtatatggattatgaaatatttgtataagatttttaataattgatactccaaactattatgaaaattcctcaactttcaaaaaacaattctttattctctaaaataccagactttgaatatagaaagccatgatttttatgaaaatatttatctctatggtcataatttctagaaacaatctgtagtactttgtaccaaaaaaaagtcggctatttttataggagtcattccaagacattattgagtgaggactggtactaggatgaggaagggtcaggcatttgacactgaagagtttgtggcatgttgcagagaggtacttaaaaagataaatgccaaaatggtacgattaatacctactatacctgacatagggacaaagtgctttttagatggctatctcaaggagttgggtagtaaatgaaacgaaggatgtaagaacatagctagagggagagctgcctggagaaagggttggtttgttttcagaatgtagaaacttgcacaggttgacaagtggagtcaaagaagagaaggaaagtttgagcttcaggagaaaaaagggataagcgatggatacatatggctattctttttttttttttttttaatctgggtctttccacaacttctccctggtgactttgactgatttcttgggctagctcagacataagaattcatgtttattaaaactgatcaaaataatatgtgatatgttttaaggactgaagcccagatgttcctactcttccagaacacttgaacatgcactgacttcctgagggccaccaggcatttagggagatgcccagtgagaggaaggcagccttgtgtcccttataatgagacccttctctgaaattattaaataatctaccttgcagtaaaaactgctgattcttcgtggaggtctcttcaaatacaatgatctgtgaaaattctgcctacagaattttaagaaaaaccaagagtaccaattaactaaaaaatttatataaaattaatgatgaaaacaatgaccattaacaaacacaaaaataaaaacccctttattgctcactctatctaatactaaaacttcacaaaattaatgtctaagttacctgatgaaagcaatttaataaatcctttggataattctaataaaaataagaaatgtattatctcattctcaaatttgccacaattaaagagaaactctcttttgaattgggaggtttctctctaaagaattttcctcttctaataaaggatattgcaatatcctctgaatagatgtttaaaatctctctcataagttctggaaatctctctcattgaaatagtcccagcttgacagccctgcaataaccattaaatattaaaataacattaaaaagcaactgctcagctcatggatctagctgcaaaactccaattcacactaatgggactcacatagctaaatccccatgtgctgtaccgaaaatttatgcccaaggatccaaggatcaggcgtgttaaagaaaatgatggattcactttcaaaaaaaaatatcgatccactaccaaacaaattatcattattcatgcaatttcagtcacataattattctaaaaaccagactgtctaagattaaacagcatccaattttgcattcacatagtattcatttgtgatgtaataaaattcatacttccattgcaagatgatttgaatgttgtaaaaacatatatacagtttaaaaaatgtgtcttatttacaaacatatcctaaagccaaaatctaattctagatacattttctgtttattatttctgtagacactacgatcataatgctaaagctttaagaactatttttgttgttcttgaggtatgttaaatataaaagggaaaaagaaagtataaataactaatagtgttaatatttaaagttgtgtggtgatctaaacttctcaaagaatttctttaaagaaattatagaaattttgacatagtgaccacacattattataatcatccatggtaactatccaagaagttacacactattaaaaaacaaaagacagtgtgtttaatggaaagtatttcagaccaaaatttaacttactcaaattccaaactaagacaagtcacttaaatttccaaattcacaattttattagctataaaatgagtgagatggacttgggaatctcttgtctgccactctatggttttctgttgtaataactaatttggtttacattgtgtctggttagattttcccatttcccccactcccaccatctccacaacacacacacacacacacacacagagtggagaaagaagtttttaaatctgatagagaactctcgtgcaaatgcatgtataatattctgtgaaattcctatttgtcaatcaaagtatttgccggaactgaaagaggcctagagaatgagaaagagaggtaacattgttgtgtggaaagagcatctggatggaaaatctggagacccagtttcatcagcaaccaactttatgactttgggcggatcacttgctttctctaaattgcaatttcattcaaagcaggaattagataagatagtcactaagtgcatgtccaactctgaaaatggatgcctacaattagaatatcactattatgataaactaaacaaagcagttacttttttttttttttttttttttaagattgagtctcgctctgttgccaggctgaagtgcagtgatgtgatctcggctcactgcaacctctgcctcgggttcaagcgactctcctgcgtcagcctcccgagtagctgggaccacgggcatacaccaccacgcccagctaattttttgtattttagtagagacggggtttcaccctgttgggcaggatggtctcgatctcctgacctcgtgatctgcccaccttggcctcccaaagtgctgggattacaggcatggtccaccactcccggccacagttactcttaagtctacataaaagaaaagaagagggtgtgtgtgtgagtgcgtgtgtgtgtgtgtgtgtgtgtaatcttgaaggatgagggctaaggataaagtgaatgtagaccattttggacattaaataatagtgtgtatatatatattatatatacagtgtatatatattatatatagtgtatatataatatatagtgtatataatatatatagtgtatatataatatatagtgtatatataatatataatatatagtgtatatataatatatatagtgtatatatagtatatagtgtatatataatatatagtgtatatataatatataatgtatatattatatatagtgtatatataatataatacatacattgtatatagtgtatatatattatataatataatatataatataacatataatatataatatatattatattatatattatatgttataattataattataaatacaattgtataattataaatataattatatattatataatatatattatataatataatatataatgtatattatataatgtatattatataatgtatattatataatatatatattatatataatattatataatgtacataatatataatataatatatatattatataatattatataatgtacataatatataatataatatatatattatataatattatataatatatatataatgtacattatataatatatattatatttttatatatattatatattatatatattatatatatatttttatatattatatataatatatatatcaggcagtaccccatataccaggcagtaccccataagtttaaagaaagtatcttttttattacttaaaaagaaaaagatatgttaaatattttctaatctttttgagcatttactgtgcattaggcctgaatctaatagcactgcagatactatttcatttattcctcactatgaaccctatgaggagttgctataattatccccattttctagatgaaaaaatgaaggcctagagacctgtgtcccacagctagtgtaactatatgaagaaatgtaagatagagtctgggttatgttccataaagagtcgtaaccttttagaatcaacattatagataactaagctctgatttctttatttttataaggatttctggtattactaccagatcacaatagctgattgtgcatactattggcccactctatcaacaataatatttttctttcagccactacaaaagtggtattataattttctaaggaaaatcacattgtctggtacataaatgtttgttgcaagaaggaaagaaaccctgttcccaaccaagatgaagagtatggactggatttatccagccacctgcaagaaccaaaaaaaaaaaaaagaactggacaaaatatatgagataataatttcactttgctgggcaatggacgacaaagaatactgatcattaaaagataagaaacaagcaaggggagtcctatgattgcccagcctaatagcttaaggcagtttcagatctgcagtgcaggaagataaaacctaagcagaactcagtaggctctctgagttgagacagagttgaaagtggggaagaccaaagccacctgagttcgtagaacagagaatcagaccaaaaggtatttagcaaagtactgaggaacacatgtaatgaaacaacctatggtccaggaatgaaccatttgaaaggattagaaggaacattactcagtactctcacaagaccaggaatagtgtctataaccaccagccagtctaaagaaacctcataatttagaggacgatgggcagagtattcataagggtcttgcattgttagtcggaaatattagctctcaattaagcacagatttggtcccacttaacaaattttaaaagttaggtccttgtattagaacatttcacactgctataaagaactgcccaagactgggtgacttataaaggaaagaagtttaattgactcatagttcagcatggctggggaggcctcaggaaccctacaatcatggtggaaggtgaaggggaagcaaagcaccttcttcacaaggtggcaggaagaagaatgaatgcaggaagaactaccaaacatttataaaatgattagatctcatgagaactcactcactgtcacgagaacagcatggaggaaaccacccccacagttcaattgctttcacctggtctctcccttggcacgtggggattatggggattacaattcaaggtgagatttgggtggggacacaaagcctaaccatatgaatcctccaggatcaaacagtttccaaatgatgtaaccacactccagggaaggaaaaaagcttaagaaggtctataggtatacaaaaacatccagcacccagctaagtaaaattcaagatgcctgaaatggaaacaaacatgactgggtatgtcaaaaaggaagaaaatataacaagtaattaggaatgaaaaaaattaagtaattgaaactgattcagaagtgacatagatgatagaattataatacaaggacattaaggcactttttaaaactatatcccatttcttctaaaagttaggcaaagacatagaagggatatgtatatattttcaaagaaccaaatcaaacttttagagctgaaaacaacaatgtctgaaattaatggtagattagacattgtaaaagaaaagatttatgaacttgaatatactgaaatagaaactatccaaaatagagcatacaaagacagaataaaagccacaaattaccagtatcaggaataagagaatgacagcactacgtattccataaatattaaaaggaaaataagctaatatgattagcaattttgtgccaataattttggcaagttagaggaaatgggttaggatttctcaaaagttacaaatgaccaatgcttcctaagaagaaatagataagatgatctgaacacccctgtatatattaaagaaagagcatttgtactttaaaacctccttaatctcaccaccaaaacaaacaaacaaacaaacaaacataaaacaacccaaaacaaaacccaaaaccacaggaccacaaatccagatagctttgctagtgaattctactaaacatttaaatgatataggaaggaataaccttaatctcattctatgaatccagcactgctctgataccaaaaccagacaaagacattacaagaaaaaaaaagaacaaactaagcccaaaattagcagaaggaagaaaaccttaaagattagaccagaaataaacaaaataaagaatagaggtcaggcaaggcaactcacacctgtaaacccagcactttaggaagttgaggcaggaggatagcctgagcccaggagtctgagaccagcttgggcaacatggcaagactctgtctctacaaaaaaaaaaaaaaattaattagccagccatggtgtcatgtgcctgtggtcccagttagttatgacgctgaggtgggaagatcacttcagcctaggaggtcaaggctgcaatgagctgtgctcatgccactgcactttatcctgggtcatagagggagaacctgtctcaaaaaaacaaacaaaaaaaaaagagaaaagaaaaattgtagaaaaataccaatgaaattgagttgatgttttaaaaagataaaattgacaaacccttagatagactaacaaaaaagagagaaaactcaaataaagtcagaaattaaagaggaaacattacaactgatacaaagagataagaaaaatcataaaagacaattatgaacaagtatatatcaacaaattggataatctttaagaaatggatagattcttagaaatgtaaagatcacacactaagaccaaatgagatttatccctgggatgcaaggatggctcaacatatgtaaatcaattaatgtgatagatcacactaagaatgatgaattttaaaatcacatcatcatttcaatagatgaagaagaagtatttgatgaaattcaaaacttttgtaatataatgaacgctataattatactctcaaaaagctaagtatagaaggaatttgccacaacataataaaggccacatatgacaagcccatagctaacattgtactcaatggcgaataactgaaaacttttcctctaagattaggactaagaaaggatgcccactcttaccagttctattcaacacggtactggaagttctagacaaagcaattatacaagagcaggaaataaaaggcatccaagctggaaaggaagaagtaaaattttttctggtttcagatgatatgatcttacatgtagaaaactctaaagactacacacacacacacacacacacacacacacacacacacagttagaattaatgaattcactaaagtttcaggatacaaaagcagcattaaagagccggttgtgtttctatacagtaacaaactaccaaaaaaagaaaactaagaaaacaatccaatttataatagcatcaaaaagaataaaatagaaataaacataaccaaggaagtgacagacttgtatactgaaaactacacaatgttgatgagagaaattgaagatgacacaaataaatgaaaagctatcccatattcatggattggaagacaatattgcttaaatgttcatagtactcaaagtgacctacagattcaaaggaacccctataaaaattccaatggcattttctttacagaaatggaaaaaaaaatcctagaattcttatgtaaccacaaaagatctcaaatagccaaagaaatcttgagaaagaacaaagttggaggcatcacactttctgatttcaaaatatattacaaagcaacagtaattaaaacagtatggtactggtataaaaaagatctatagaccaatagaacagagaacctggaaataaaggtatgcatatacagtcaactgatctttaacaagggtgccaacaaaacacagtggggaaaggtcaatctcttcaacaaatgatgtcgagaaaactgcatatacccacacaaaagaatgacattggaccattaccttacacaggaaaatttgagatttaaatgtaatttttcagcccctaaaattttacaaattcataaactgtaaaatgcctagaagaaaacattggggaaaaacttcacaatattggtcttggcaatgatttattagatatgacagcaaaacacaagcagcaaaagcaaaaatggacaagtagaactacataaaactaaaaagtttctgcacagctaagaaaacaacaaaatgaaaaagcaacctaccaaatggtataaaatgtctgcaaaccatatatctgatagaaggttaatataaaaagtatatagggaactcctgcaacacaatagcaagaaaaagtacttttaatgggcaaaagactggatggacatttctcaaaaagagacatataaatggacaacaggtatatgaaagatgctcaacatgactagtcatcaagagaatgcaaatgagatatcacctcacacctgttaggatggcaattattaaaaaaagaaaagataaatgttggtgaggatgtgaagaaattggaacccttgtgcactgttggtgggatggtaaaatggtgcagctgctatggaaaacagtatacagactccttaaagaattaaaaatagaaacaccatatgatccagtaatcccacttctggtatatatccaaaagaactgaaatcaggatctcaaattgatattcaatctcctgtttattgcagcattattcacatagccaacacatccaaacaatcttaatctctatcaatggatgaacagataaagagaatgtggcatatacaccatggaatattactcaaccttaaaaaaatcctgtcatgtgtgaccacatggatgaacctggaggacattatgctagtgaaataagccagtcacagaaggacaaatacttcataactcaacttatataaagtatgtaaaatggttacattcatagaagcagagagtagaatgatggttgccagcggctgggaaggaaagtaatggggaactgatgctcaatgggtgcaaagattcagttatgcaagatgaacaagttctagagatctgttgtacagcattgagtttatagttcacaatactctatgtgcactgaaaaacttctttaattagagggtaggttttatgtgaagttttcttaacacaataaaaaaacaaaactaaagaccaatatgcttcatgaacacagatataaaagttctaaacaaaattttagcatatcaaattcaacattacataaaatggacaatatatcatgatccagtggaattaattccaggaattcaaggctggttttaacaattgaaaatcagtcagtataattcaccatattaaaaccaaaattttaaagaaaattcatttgatgttgacaattccaacatctattcctaactaaactccccagcaaactaaaaatagaagaagacttccacaatctgataaaggttattgatggaagtctacaactaacatcacacttaatagtgaaagactgagtgctttccctctaaaatcaggaaggaggtaaagatggtcttgctatttttattcaacattgcatttaaggttatagccaatgtaataaggcaaggaaaggaataaaaggcatcaagattggaaatgaaggagtagaattgttttgttctaaagacatgatcacctatgtagcaaatctggtggaatcttaaaaaaaaaagcaagtttgagtttagccaggttcaggatacaagataacttatgcaaaaattggttacatttctatatactaagaacaattagaaatttaaatttaataaagtgtacatgtatagatacatctaacaaaaatgtgcaagtgttgtacactgaaaactagaaatcattgctgagaaaaattagagatctaattaaatgaagagatatagcctgttcattcatcaaagacctgttaacatgtcaattctccccaaattaatctatagattcaacatggtcccaatgaaaatcttagaaggctatgtagaaattgacaaaatatttctaatttattatcaagtcactgaggtatttaccacaatgcagacaaagaacagagttgggggtccaaaaatagatgcacacataaagaaaactcacttttttccaccaatgatggatatccttaagcaaaatcataataataaaaataataactttgattcatactttggaacatatataaaaattaactcagaatgggtcacagacttaagtggaaaagctaaattgacagaatatctaggagaaaatctgtgtgacctttgattaggcaaagatttattggataccataccaaaagcatgatccaaaacagaataaattagtacaatggacttcatcaaaattaaaatctgctgttcaaagaacatggttaagagaataaaaagataagtcacagactgctagaaaatacttccagattatatgtattataaaagaactgtgtccagaatatatacagtacttttaaaactcaaaaaaaattttaagaacccaattttaaaagagaaaatgatttgaacagacctttatactgatgccaaataatcatatgaaaagatccaacaatattagtcaatgaggaaatgcaaattaaaaccacagtgaaacactactacacacctattacaattgttaaaattaaaatgatcatccatatcttatgctttagggatgtggaggaattagaactcttacacactacacactacttatactgccagtgggaatttaaaatggtacaaccactttggaaaacagtgagacaatttcctaagacacacacctaaccatatatagcactcattctactcctagatatgtaactaagtgaaaagaaggcacatgttcatacaaagactcgtgtacaaatgttcacagcagctttattcgtaatagtcccacactgggtctagtggcttatgcttgtagtccccgcacattggaaggctaaggcgggaggctcacttgagaataggagttcaagaccagtctgagcaatacagtgagaccctcgtctctacaaaaaaattaaaaattagctggatgcagtggtatgtgattgggaggctaagaccagaggattacttgagcccaggccgcagtgagctatgatcatgacactgctgtccagcctgagtgacagcctgaataagtaaataaataatagcctaaaactggaaacaacccaaatgaccattaacaggtaaatggataaacaaattgtggcatacatgcagtgaaatatgctatggtttgacgctgtatcccgacccaaatctcatgtcaaattttaattcccaatgttgtaggagagatttggtgggaggcgtttggatcatggggcagatttctcaccttgctgttcgtgtgatagttcttgtgagatctagctgttcagaagtgtgtaacacttccccctttgctcttgctctcctgctgaccatgtgaagaaggtacttgcttcccctttgctttctgccataactgtaagtttcttgacgcctcccagccatgtggaactgagtcaattaaacctcttttctttataaattacccagtctcatttagctctttatagcagtgtgagaacagactaatacagaaaatactacccagcaataaaaaggaatggactatggacacctgaaacaacatggatgaatcataaaataattattctgagtttaaaaagccagaccaaaagaataaaacaaaaaatatacactgtatgattccatatgtataaaattccaaaaaaaatcccaactattcatggtggcagaaagcagactattggttgcctggggattgagatgggaggcaaggaaagtggaaggcaggattgggaaggagggataacataggggcatgaggaagcttttggggtgacatgtgcattttcttattcatgggcatatatatatatatcaaagcatattaaattgtacacttaaatatgtgcagtttattgaatgtcaaatatatttgacacttatacacctcaacagagctactttttaagaatatgaaataaggtaggaggggcatgagcaatgagatattacttaattggtacaaagtacactattggggtgatggtgacattgaaacctagacttcagtactaaacaatatatatatattttttgagacagagtcttgctctgttgcccaggctggagtgcagtggcatgatctcggctcactgcaacctctgcctcctgaattcaagcgattctcgtgcctcggcctccctagtagctgggattacaggcacgcaccaccacgcccaagtaatttttgtattttcagtagagatgggatttcaccatgttggccagtctggtcttgaactcctcacctcaggtgatccgccggcctcagcctcccatagcgctgggattaccgggcctggctaactatatattcttgtatcgaaactgcacctgtacctcctaaatgtatacaatttaaaaaaataaaacagccaaattgtcacaaaataaattattaatagtgtggagtgtttcactttcccatgtttttttttcattacaacaatacagtgagctacatatcatgattatttttatcatattattgttttacattattattgttcccatgtaatctatgataaaactgaggctcaacatattactttgctcaatgtcagataagctttggcaacaaacacgatatggaattccttaaaagcaaataaaataaaagatagacctcacttcattacgttggtcctcaagcatttccattcctgctttctcactctcccccctcatatcccgaagcaactctcactcaattcaagagtgcccatcattcccaattcccaatccccctagaaatgtgaggtaacacctcagtctgccctgtccaatgcagtaggctctagccatctgtgctactgagcagtagaaatgtggctcatccaaattgagaagtggtattataagatacagcccagtttctgaagatgtaaatagctcattaataatttgtacattggccgggtgcagtggcttgcacctgtaatcccagcactttgggaggccaaggcgggtggattacctgaggtcaggagtttgagaccagcctggccaacatgctgaaatcccatctctactaaaaatacaaaaaaatgagctgggcatggtgacgagtgcctgtattcccagctacttgggaggctgaggcaagagaatcgcttgaattcgagaggcagaggttgcagtgacccaagattgtgccactgcactccagcctgggtaacagagcaacactccgtctcaaaaaataaataaataaataaaaatatttttacattgattttatgttgaaattataatatttcgcatatactatgttcaataaaatatattatcaaattaattttacttgcttatttttactttttcaatgtaattcctagaagatttcaaattatacacgtgtcttgtattatctttctgtcagaaagcactgatttaaatcctactggggaaagcaatgttatgctttttgttatgacaacttcggaaaatcattaacttgtgttataatcatggtgctatatagctttggttttgtaaaagggtggaaggctctaggtagggtgtcatggatagaatcttgtggtgatagttgaagaaaaattggccttggcagggtagcagatggtgattaggaagaaaaaggagccgatcatgaactcatagtagagtggtagaaaaactttgatcccaactctgagatcagttttgtaagtcaaaccagttcttgtgccttagggtacaagcatattttgaggtacaatgctagtgttgtgatctgtcacactcctgcagctgtttgtggcagtcatgtaagatggagccagcccagagtagtctgggcccaatcagctgcttatcttgcaactattaccaaagcaagatttggagcagcagccgcagcttttgactctgtggattaaaatctcaatctccccaaagccttgcctcatgccaaactcctgtgcaccataatgctctctcttctgctcttatttctcagtcagctagtgttgtgccacactgtttgaaattggtaagtgtcaatgaatcttggaagcttttcttgggcccactgtctaactcttcaccataagaaaagaaggggcatcagtacctactgtactggcaaaattgctgcgtttcagtacatggtaggtagtgttccattttcatcaattatattaaatccagctcatgtaaaatgctgttgaaattgcaaagcaaaacaaatgtcacaaaaggcagagccaagttttgcggttaaattgtactctcccagactcttccctctgcaatgtcttgggctgccatgtgaaccacttccctgggtgtaatctttccatcttgatggatatcttcctgttgtagctgttaagtagttaatatataacatccctttttatcatcttctgaatttggaatcaatggaaaaacagatccaggagtcagacagatggtgagagaatgtggcttttgattagtggcccagaaatctccctaatacttcactcatcaatgaaacactcaccaagtcaccaacagagctggacagcaaaggtctactccaaactgagtgcaggaacaaaaggatcagagcctccatgtcctgtggcatcctccaaagacaaaggagtccaacaaggcactgaaaatgctcagaaatgccaaccaaactcaaaccaaattaacccgcaggagtaaggcatagggaaaaggtcggttaccctggcagaagtccctctgcatgaaaacattaggccagggaaatggatattcctcctgacctctgcacctatataaatgcattcatctgcatgtttatgatgggtttttacaaacacgtttgtcagggtttggcatgtagacctataaaatctacttttctggatccaagttctattcattcactcattccaaaaatatttggccagtgcctgttacaggctaggcacaggtctaggtgctactaggtgaagaaacagacaaaaaccctgccttcatggagattatatttttggcagagaagactaaaaaaaaaaataagcaaataagtaaaacatatggtactacagatggtgaaaagtgctattgagaaaaagaaaacaaacagggggtgagtgtggaagttgtgatatcaaacaaagtaactagggaagcctctctgggaaggtaacattagaagaaaggcccaacagaggtaggaaaaggagccctgcagatatttagggaaaaagtgcaccaagcagagcgaacagcaagtgcaaaggccctgaggaaggatgcttgttatgctagggaaaatgcagagtctaaagtggctggaacagaatgagtgagccaagttcacatatcatctgtgtcttcagggttatgacatgttcatgtcatgatactcctgccttttttgtttgtgttttaaaattcagactcagcaattttactgcaactctggtgctcacagctatcacgttcctctgtacacacaagccataagcacacccgtttcagtagttctgaggctgcctcacctttgctcagagcctgaaaactgctggtgggaacagcatctctcttcattacatttctctgaattcatcaggcacccagcaaatgccattcagaaagcaaattctgaatatgtgtgtggtgaaggacactcctagactattgcctcaaggattttcatgaaaaacctgccccccgtatgagtcttcccagcagcagtggcttcattgagaatatatggctgaccactggcatatttagttcatacttagcacagccttctccgaccatcttaccttgggctgctgtaacaaatgtctacagaacagttggcttaaacgacaaacatctttttctcacagttctgtgggctgggaagtccaagagtaaggtatggacagatctgatgtctggtaagagcccagcccacttcctggtttgcaggtggctgtcttctcattgtatcttcatatagcagagaacagagagaaagagcctgtgtctcttcctctttatataagggcattaattccattcctgagtgctctaccttcctgacctcgttacctcctcacctccaaatgccatcacattggggattagccttcaacacatgaattttgaggtgatacaagcatttagtccaaagtacccacctttttccaatttagctactggcatttgtatacattaatgtccatacctcctaccgcccactccaccccaccatttattcattggtttcacaactatttattgagggtgtattataggctctcaatgaataaaatagactcctgcccttgggagcttatattcaaaaggataataccttctttgaaggcgggacgctgtcttagtcaccattattcccacggcccatagcacagtgctttctttgcctaacatgctctataaaaatatgcaaatcttgagacaagtcacaaagcagaattttgtggaaccaaaaataaatgtgctcatctcttttattctttaaatggctcatacagactaattggaatggagatgcgtatttaactcaatgccttcctctaaaacatactcaaggtccatttatttccaagatggcattttgacctgtgacaactaaagccccatattgcaaaaaaaaaaaaaaaaaaaaatactgtggcaagatgctagatcggtctaattttctccctgcattataaatctttaaagctattgggagtgggagtttaagatggttgaccatttaacgtgactgtttaataaattgcattgctagtaagccatagtacttaacccctcaaaatatcagtatattaaaatcttctataatgttatcaaggagaagaaaataaattttgagaattttcctaaagtgcttgaattaatattatctttttgtggtctaggaaattctgctaacagccctgctgcttttccattaaggttacagtgagacgaagcatgtggcacgcagcttccatttgtagatcaacagtgaaggagacagatttgtagtttttatcagcattagcagggcaaagcacatttgttcacaggtgttaggagtcaccacttgaatgaaaagctgggcagggaaattgtatttgtctagtgaaaatgtaactgaagcataaacacagcccacacctttgagtgtggcattctacagtctgcactgctgttaactcacattgaaaaaatcttggcattttctttccttgaattcattccttaaatggaattagcacattttaaatccttatgattatcattattgacggaatgatagcatttggatccgcaacaaccttttcattgttaattgagtgctgagaatgggagatgatatagttattctgatttttaaaaactagaaaatggaacgtgtgaacagtggcatatgaagctctttgacagacctagggctaggactcaaggcatgtaattccaaaatctttgtttagtcccttaggaaatagcttctcctgagttttgtcctgttgattgtttggcagttcccttaggagactaaatttgctgaagaaaggcagcctggagcagggttaacagtagaaattatcattttttggatccactggccttgtaacatgggagaaatctccactccaccttatacacacctttttctcataatttgttggaaaatttatcttaaaattcagcatcaaattcaattgatcgtttgacctactgacttttaagaacaacacatttttatcagatgctttgttagacactgtcagataatcaaaagtacttccactggtttacaggttcctcgagaagatgggagtatattctgatgtgccatgaatttatttttttagaaaagcgtaagagaaaatacaatacttggaaaataaataaaatctgaacgtaacttttatcacatcccccaacaatgaagagatgaggcatgaacatgctcacctctacccattgtgcctactgtgctgtaggtattgccgaacatatggtgcctggtgtcacccactgttctcattcccccttccctctgagatgtgcagaccagaccccatcagcatttctagggaggataatataatgatatcaagttaccagattttgatgtgtgaaaaatgaactaggtagcactttcctagccatgggagtatatgcaaacaatgttattgagcaaatattatgaattaatttaatataatcattacaatagagaaatattctccatcatttcaattgtcattcagttgtcaccaggagaacaagtattactgaataaatacgattttcatcaggatcaagtctgattattggtttattttaatctagtttttgttttgttttgttttgcctggaaaaatatttaccctgcttaagttatagatattacctgttgtttgaaatgaaatttctacctttatctgccccaaactttgggttgacaaaataattccacagatgaaaacattgctgagttataaatccatattattactttcacaaaaatctagcctgtgtccaggataaaatgacaatggcactttgaaagaaagtagatagcttcaaattatgtctttgagttatggttctgggctgtgaattaggctcagaacagagaagaagagaaacatttccgttaatattcccacagtggaagaacagaaaggggtaaaagagcaatcatcacattttcacactctcaaaagtaatgggataaagatgttccccgtaactttagaccaaatgtgtagacaaaggaagaaagtgtgtgttattttactctcatcttctctcatctccttggttagaaatgtgtcgctcaagcaactacttattcaaatagtaagtgcttgagggtagttaccgttattgaatctcatactgtattagggactggaatggggaagcaccctaactgcagaagcataatctcacttttcagagcagtgattttcaaacttgagcattcatcagaagcaccacgaggacttgttaaatagattgctgggcccaccccggagtttctgatcaggaggtatgggtgggacccaaggatttgcatttctaataagttcacagctgatactgacacaattggtctgagaaccactttttgggaaccactgctcttgaaagcagcacagcaaaagtgaaacatattttggaatgcaaaacctgtttcagctgtggctccaccgcttcttaggttatttgcctctgttgcccctatttgctcatgtacaaaatgcggagtactaatatctgcctcatcaggttttggagtatgtgtgaaactatatgtgattgtagccgcatctttatgtaagtgtatgaaaaatgcatatgcaactggtatgatttccttcatcaacttggagtactaatgcaagtccgtcttttttatgtttccagttaatcattcctacctccacttgtccaatgtagatagatgttcaatgtctgcctcttgagaccacctccttcccccaaaacatatatctcaggagtttactcagtttgaagaacagtccaccttccaactctagaagagagaacctcagagtctaatcagcccactgacctttatttctgctccaccacacaatgtcaccatttgaaactcagctcacaccatcggatggaatttttcatctgtacaatgctcttgctagaccaagtttcgttacaggccacagtggtgccccaaacttaggatccaagattgcggctctttcagctcacacacatacgctgttatttccctaaaatgtgccactgtacagggcaattgggtatgatgggttttcagtctaggccacatgctgtgctaatgccagcacccactgctacctggcccaacctccagaccatgttatggtgccagggttaccagtcttgactcccccttttcttgagatgaatgctcttgtgtgacttagggtgcccattctgcaatctcagttctcctcaacaggaccccagtgaggtgttccagctgtcctccctgggtctgtgcttgtacatctgaaatcttctaataacctaaaaagggaaaagggctggaatttcaattgttttatttcaagattggtcctcaatgcttatgtcagcttacctccctcaatggcctgccttcagtgattttgccgaccatccccacttcttcccattcccctggctctactggaaaagtcgtagcaagtaggaggctgtccctaactagtagccattaccaatgaccaccaaccttcttataactccactctgctctcccaggtgatgacatggggctcttgcaactgaggatactgctgatcctttacagaagttggtttttcatctatccattacttgagatgtggaggttttccttgtcccctttcctagtgagatccggtcttgccacacactctgccatttgctcaccatgcagaatccctgcaacatttcactctttgcaactgggtgggcaatgcgctaaaagcaaagatcctctttgtcctctctgttaaaagctgaaccagagccagttccaagcaggcctcttgcactccctcctttcttaacccttccgtaactttccaacagaaggcacagcaaggcccatctcacccccaccagaggaagaaaaaagaggaagacaaggaaaggaaggaaacttgccccaacccaaaccaaaaacttcctagtgtgtgtccttgacacacaatggagcagtttctccaaggattctggggtgggggtgggagaatggcagaaaaagggaagaatcggctttttttaaaaaaaaacaaaaaactgatgaagtggcagagttaaaactttccctcaatatttgtgtgcagaatctatatctagtgcttttaaaaaatcattgttgttaagatatagcaaaataataattacccagtcattcaataaaaatgtgtccaacgcttgttctgagtaaggactgttctatgtgccagtgacagttatgggaagaatggcgcaaggaatccaccccatggatgctttgggtcaagtagggagctccaaagacacgacattgatgacgtgaggatctgtcacagcagttcaaggttctgaatgatgagccccataggaggaccatagagctattcaacccagagctcggagaaattgttttctcctcaggaggaattgttcccatgctgtgccatgatctcctggcctcctaacaaatgagacatgctctctgtggtgtttttctctgctcacagggacagtaagcatctattctatatattctgtgtacatgttttcccttggggttgatagcagctctcttctaaatgggttaaccagcagcagagatgcagcctgtggttatgaaatggagtcatttttactattagtttatggacaatagtgaggagtttgtgtcgcctgttccacctgttattaactattttaacaatctctcttagaagtatgcacagaaatacattctgggtttgacaattctatatttcagatcatatctggcattcttcaaaatagaatgagctcaataaataataataataatacctaacttaattcttaagtaacaattcataatttataaaactggtacgaatacatgagctctttataataactctatgaagcaaataaaataatcttcatcgttatggataaactgtacctctgagaagttcagagctttgcctagatctcagccagggtgactaattactgagggacgtttggcaatatctgggagcatttttggttgcctcaacttgaggggcacagagggtgactacgggcatttggtgggtagaagccaggtatgctgttaaacatactgtatgtaatggccaggatatacttccacgtcaaagaattttccagcctgaaatatcaatagtgccaaggttaagaaaagctgctctagggtcacaaagctggtaaaatctgaacccaggtatattactctaaatctagtatctttctatgtcccccaactgtaaagctttcatcttgaattgaatggggaagcatcacctattacattttacattatgttcattttggtttccctttttcctgagctctggggaaggggcggaaattttgcctttagtagacaatgaaatgttgctataatataaaatcatacctagtgattctggaaaatctttcagcataatttccacctctttgcaactttatcaaactctgttgtgtctgcaattacaattttttggactacaaagggtgataaattttcctgtgtttctcaattctaagactaagatagacaacatctaaaaccatgtaagagagatgggaagcaggagtaaatgattgattagcatgtgtgtgtgttctcaattattgatggtaatggcccgtggatgtaatgtgaacttgccaatgctgctgataatcgaaaagtcatttttattgagatttggaatatgaaacactttttaaaaggagagtcatctatctaataatcactttaattttgaggtaagctactatagcagttatttttaattccctaaatacacatcactgtgaggcaggagaggcatccaagaatgtgctagtcagtggcggatgccaacaaagattaaaaattggaacaagattagtaaaggaatggctaaaaaagctgtggtataggcatctcctagccaagggcaggagagttgagggcgtggataccagagccagacagccggggttctgaccctgaccctgaaagcttactaatgttatgatcttgagcaagttacttaattgagcaagttacttaatttctctctgcctcagtttcctcaactataaaatgggagtgtatataatacctaccatatagggtggtgctgagaactaaatgtatcttaaaatgtgcctgccacatagtaagtgtgatagtgctatatattttctatattttgtaggcattaacgtgaatccggcaaacctatgtatagtgatgtgaaaacatggcatgacatcccgttaagtgagaaaaagaaaaagaaacgaaagaaaatcacagagccataattatcacactggcgcatttatattttaaaaatccctaatgactagacaggtgacttataagttgcacagtgaggaagaacttgaagcctttttattccatgagagaagtttacaatcactttccggtttgggagtaggtgaatacttgtcaccttgaagccgaccttctttttttcttttttaagacagagtctcactctgatggcccagactggagtgcagtggcatgatctcggctcactgcaacctctgcctgccgggtttaagtgattctcctgcctcagcctcccaagtagttgggattacaggtgcccaccaccgcacccagctaatttttgtattttcagtagagacagggtttcaccatgttggtcaggctggtcttaaactcctgacctcaagtgatctgcccgccttggcctcccaaagtgctgggattacaggcgtgagccaccgcacccagcttgaatcagactttcctttcctttttttttttttttctcagttatggaatgtaaaatcagaagtccagttgggcctcagggaaagggcacagaaagaccttttaagttccttcaaaggccacctctcccaagatcctttggaatgtgaatctggtcacttgggaagaggtgggcagatggtgcaggggttcaaggagccctctggaaggacaggcatcttgttggttactatacaatactccactgtagattatatgatttatctactcaattgtccctcaaatttaggttttcccagttttggctattatgagcacagctgctttgaacattctatatatgtatttttgtggatacagcacttatttcttttgagtgtgtaacgtggttagaacctgtctactgtattaacatggtcatgtctgaggtctattggaaagaatatacaggcatttctctgtatctgagggtgattgttctgggccttcctgcggatatcagactccacaggtgctcaagtccctgatataaaatggcacagtatctgcatataaccagtgccatccccccatatactttaaatcatctccagattactagtaatacctaatgcaatgtaaattctttgtaaatacttgttacactctattgcgtaggaaataatggccaaaaaatagtcttatatgttcaatacagaatttttttgaatacagtatttttgatctgtggctggttgaatccacagatgttggaacccccaaataaggacagtcaactgcactccaatggtcccaaagaggaatgccaccagagggtagaagaacctatctgggtggcaaagcctgtatactgtggcctaggagtacatgagggtgaccacttctggtccaggtgtagctgaggtggaaagcacatttgaacaaccttcctttgcccagagttcacacccgtgagaatggacaaagtggataatattggagtccatgtgtacggttccactgtccctgtgtagaacacaatattagacattggaacaatgaagcactctaggacagtactggccctttagaggtttagagtctaattgaggaggcagcagcaatatataaatctatacatcataataatttatattagaagcaatatgttcatctcatacattgctggtatgattgcaaattggtaaagccactttggaaaacagtttgctggtgtctactaaaactaaaatgtgcctatctgtgacctagcaattctaggcatgtaataggtgtatcctaggtacatattcaaaagaaacaagtgctgtatccacaaaaatatgtatatagaatgttcaaggcagctctactcatagtaaccaaaacctggaaaacctaaattttggggaaaattgagtagacaaattgttgtatatctacaatggagtattacacagcaataaaaaaaaacagccttctcctacaggcaaccacatggacaaatctcacagatacaatgagtgacagaagccacatggagttgaatatacactggatgatatattccactggatgatgttccaagttcaagaacaggcaaaactaatcagtggcaacagaagttcaatgggatgggtattcactatgaagcagaaggaggaagccttctgggttgttggaaatgtttcatatcttgatctgggtagtggttacactgatgtatatataagtaaaaatttatcgagctgtacagtttttcactttttatcatacatatattgtaccacagttttttgttttgcgataagactctcactctgtcacccaggctggagtgcagtggcacgatctcggctcaccgcaatccctgcctcctgggttcaagtgattctcctgccttagactcccttgtagctggggctacaggtgcccaccaccacacccagctaatttttgtatttttagtagagacggggtttcaccatgttggccaggctggtcttgaactcctggcctcaagtgatctgcccgcctcggcctcccaaagtgctgggattacaggcatgagccattgcacccagtctgcagctttctttttttctcaagtttttgtgttaagtataataagtaaatgagttcagagcactgagtgatgggtgaaggtcaagaagtcagagcagacttcagaggggagggaagaattgaggtggatttgatggaaggctggaacctgcacagggaaactgcaagagggaagttggatcatggaaggaaatatctgagaacaaatgcattgtagcacagatgccaagaaagcttggaaaatcttgagctttctcttcaacactcatcttccctccccaccagttgagaagccttgggtattatgtaggataatcttcactcagctccaagggtaggctttgatagatttgagtctcagcaacataattacttagggatgaatgtaaaccagtcatgacataatttgagtcaaaggcaagtatattcctaaaatggtccagtctcacctcagctgaggctttagtttcaaggttcagggggcaccaacagctatctccgtctagaggcaaacaaaagagtgattgcttccatttttactggtagccatcttggtatcatgagggagttagcctgacataaaattgggctgagttgagagaaaagtagagaaatgaagctggagctgtatttgatggctctaaacctttttggatttgcaagccctttatcatttaagccagtttgaattgatttttctattgcttcgcaaccctgatggcttttctgctaatctatacacagcatttcttgaatgctcgttttcatggccatagccacagccctatttcagaatctcataagcagtagttaagtgaactgcagtagctttctaactggtctctgccttcagtttctttttaccttaattcatcctccatgttgcctccagaatgttcttctcaggcacatcttatcactgccaccatgtgatcatcctaatggttccatgcattgtgaaaaaaggccaatggcacatgtatacctatgtaacaaacctgcgcgttctgtgcatgtatcccagaacttaaagtataataaaaaaataaaaaatacaaaatagaaaaaaggccaatggatccaaatttgctgggttttaacagtttagtcttttggttcttctcacaaaccctaacaagatccttactctctagccttctcatctttgccagagttaatgcttcagcccaggacattcttttctctctatctgcttcatgggaataccacttttctttccagattcaactctagtctcatctcttctaagaagccttctaagatctctccagctgatagcaatgactccttgcattatagttttacggcatgattttaccacttgataactctctatatagtttgtcaggggtttgggtgatttattcttgtctagcctacccattagcatgtaaaggctgggaagttaagggccccagtttttcatcttgaatgaattcttcattgccccttgcatagtgcttttcatagacaaactgctcaatgtcttgtgtcctcaatgtcatgtgtcctatgcttaactgactagagcaaagacttcctttaggagaggatatggaaataaagttggaaaagttaggtggggagggggttggagggcagcttttggaggattttaaaatccagattagatatattaagtgcaattattttactgcactttggaataggcaaaagattatctgttttccaaaatttctttcattccttctatattatttactctttttaaacttttacctttttttttttgagacagagtcttgctttgtcacccaggctggagtgcagtgctgcaatcttggctcactgcaacctccgcttcccaggttcaagtgattctcgtgccttggcctcctgagtagctggggatacaggcacacaccaccacacccagctaatttgtgtatttttttagtaaagacaggctttcaccatgttggccaggctggtcttgaacttctgacctcaggtgatccgcccacctcagcctttttaaccatctccttttctttgggggagagggaagggggaaagcagctctcgggtttgaaatatcatgcagtttgagaagaaatagaatgcaaagatgattagctttcttttctcctctccattataatcccataatagacttcatgaatacccttgctagcaaagcaatgagggccattgcattagactgttctcacattgctataagaaactacctaagactgggtaatttatgaagaaaagaagtttaattgactcacagttccacaggctgtacaggatgcatggctggggaggcctcaggaaacctatagtcacagcagacaaaggggaagcaggcacatcttcacatggcacagcaggagagagagagcgaaggggaagggttacatacgtttaaacagccagatctcatgagaagtcactcactattatgagaacagcaaggggagtccgcccccatgattcaatcacctcccatcaggcccctcctccaacactgaggattacaatttgacatgagatttgggtggggacacagagacaaaccatatcacccatctacttgagcagtggctataaacttttttttttatgataacctagtatgcatgtactatactgtatattatacagctgaaacaagacttttgtaaatcagcaatactcttgttatgatgcaagttagtattttccgttatgccatttcacttcaaacaaacaaaaacaaaaagttgatctaaatcaatttcatgaccattaaagaaacgtgttcttctcaggcacatctgatcactgttgtcacatgcacgattctaaaggttccacacattgtgaaaaaaagctaatggatccaaacttcctgagttttaacactttagtcgacatatgaaaaatgtggcattaaagcatatgtatcctaattactaggttacaactgttgaatgagctaagtgcttttgccagtattttatatttaatttgatataataattttatgacagagcattatacccttttaatagatgagaaaagagaggcttagaggtacagatccaaggttacacagctgcatatggcagagctgagatttaaacaaaagtagaccaagcttctgcttacagctcagtgacatgtgccatagctttaagtgacagccaatgcaatgaagatttccatgtgctgatttttttccagatggagtctcattctgtcatccagaccggagtgcagtggcaccatctcagctcactgcaacctccacctcccaggttcaagctatcctcctgcctcagcctcctgagtacccgggataggcgtgagtcatcactcgaggctaatttttgtatttttagtagagacggggtttcaccacgttggccaggctggtcacgaactcctgacctcaagtgatccacccacctcggtctctcaaagtgctgggattacagaggcgagccactgtacctggcctgcatatgctgatttttaaactttcagcacatgcaagggaaaacgagaccaccgacgtacagacaaaatgctctccagcctacaacttcatttcttctctggatctctattctggccctagaaatctgcaagtcctccaaaaaaaatgacaaaacccttaaaatagaatagtcaggctgcaatagaaaaaacagttttatgattaggaggaaacttctagaaggctagtactaaatctttttcagtcttctttaaattaccaaaattccatggacactcagaatgaaagattgttgaaattttatttttttccttttccttttcctaaactcccaaaccatctaaaagcaggcaaaatctaaattctactctgtatatgtctaggtctagtaaggaaggtttattatcttaaacatcaatctgttatgtatgacttgatttctaaaattgcttaattttctgggtcattcctggaggaatacttatgcactacgcagtgtgttgggtcttaaggatacaaagacctgctcctcacctttaaagggggaacatgcactgaaaacagagaacataataaaccaataattgtgcacagtgggacccatgcagaaataatggtacaaggtgttgaggaaagacagtgaattgaatcgtaatcctgccaaggcagaattttgatttttcctacttttaggtgttttgagggtttgggaaaggaaaagggaaaaacgcatctttgacaatctttcattcttagtgtccatgaagttacattaatttaaataagactcaaaagatttagtggcagcctcagagaaggctccttctaatcataaaactgttttctctgttgcagtctgagtgttctattttaagggttttgtcattttttggaggacttgcagagtgggagactagggcaggaatggagatccagagaagaaatgaggttgtcagctagagagtattttgtctgtacctgggtggtcctgccttcccttgtgtatgctgcaagtttaaagttcagcgcatgcagatcttccctgcagttgtccatgacctaaagccatggcacatgtcactgagctgtaaggagaagcatggtctacctatgtttaaatctcagctctgccatatgcggctgcgtcagtctcctcctctgtaaaatgttaaaatgttataatagtgaagcagtacgatgacagcaccttgtattgtattaaaaataatgaagacactgtccccatggcttggtaaagtaaggcaattattgtacttacatctttagggtctagagcttaagcgacaggagtcagtagcctgctggaaatcaaactcaccagcaacatttactaacaatgaaatcaagctaaaatgaaaccccaagaaaaactggaaaaaatatgaaagctgcactttttagggtaaagtgtgcatcttgagggtacagacagattcttcattcatttatttaacatatagttattgaatactttatatgtgccaggcactgcatgggtgtagagacatggagtggacaagattcatgtactctggcatcatggagtctacagtctgatgagggagctggtcaatgtaaaaggaaatgcatcaacatgaggatcccatttgggcacagtggccctaagctaatgttatggcagagaataatacgattgagtacttactttagacagaatagttaggaaggtctgtaggaggaggtgatgtttaagctgagaccagaaggatggatgacagggagttagccttgtgaacagtgacggaaagaattaagagaccagcatatgcaaaggccctggggtgtgtagaggactgtgtgtgtcataaatctctggacttctttcacacaaactggctgaagctctccccatccctgttgccagctgcctttctgactcagacttacagtgtgagtagggctccagattgaggtcctagctggttagttatacccatttgacttatcaacctaaaaatatgctgggatagtcttccctttctacacatttgccacaggctatatcttgcttactgtgagttagccattcaatcaagactgcccttgacatttatttcattctgattttttttttcctacatttttgcctcaggtcctgagagaatggctgctgacacaaggtagatgctcaaaaattacttgctgcatctttggatgaatttcattagagcatcagagaggaaatttttgttgttgtttgtggcgctatttgcttgtttattttaacacaggtgggactcggggagaacaaactggatggaatttgaaggagaatggtagggcattctggattaccagagggctgcctggctatgccgctccttaacgacatgaccttggcccagtcatcccacttgagccctgacattctcaactacaaatgagggctttagaccaagtacccttcaacatataatgttttttgtctatgaatccagtggcaaatatggggtatcaatatttgccactccttccatactactgtgaaagaagcattatctttaggcattaattcagctcatgcaataatgatgccttatatttgatagaaatttgtcatttacaaagcaccttcatttacattatctcatttgattttaaccagtcatgtaaggtatttaagatagttataattttttttttttacatctgacataatgtgaaacttgcccaaggtcacaaagagacagaaaagggaatgaatgacacttgtctgtgctgttctgagtataggtggcacaatgaatcagataggatctctatcatgtgtgagtgaagcaaatttttttagtttaccccctagaatagcggtcactactttagaaaaaaatgttaatgacagtgttgacaatgttgaaatgtaaataatcttttttgtattaagttctttagtagtaaggatcagaaaagtacttaggttagctcacctggggaaggggaacattgcaggaattagcaatctcatggacagggaatactggactcctcatagtaattgggaaagaatctctaggacttaattgtttgtctgcttttcttggaactcccaagaccgttctctcttatctgaagagcagtttcctctgcttactcatggttcttgtttccctataaccatggctctcacatggcttagcttgctgggaccaggtctggcccactgactacaagatgggcgtgatccatcactcaccataggctacggtcaatctcttcctcttcgctcctggggtccaatctgctggggctggtggggctggggcaagaaggagtcatgtggcacccccatcaagttctaccttgctatgaactgaatgtttgtgtctcctccaaaattcagttgaaaccctaattcccaatgtgctagtattaggaggtggggtctttgggagataactagggttagctgagatcatgaagggggagcctccatgatggcattagtgttctcataagaagaggaagaaagaccaaagctctctctttctccactatgtgagaattcagtgagaaggtaatcatttgcaagccaggaagagagccctctccagaacttgaccatgacggcaccctgatgtcagactttgtagcctccaggggtgtgaaaaacaaatgtctgctgttgaagtcacccagtctgtggtattttggccagcctgaattgactaagacatacttctatatgaggatttatgaacaggttcctaggcaagggagtctgcaaattgaagaggcatcccaaaacatgcctactacccctccttttttatttaagtttcacaggaccctcttggttctccttttcttaggtgcctccaatcttctaagtataacattctgtgacaattctgtgacagaataagtatttattctctgataattaaggaaaaacaaaaacaaaaagaagacaaaacacccacatttgtccctgaaatttaaaatacgaagggttgttccctggttttctgattgtagggtcaaaaaacgaagaagcaacgagactagcaattggatacctttagatcccaaacttcatcctatcattggtttctggatagattatttattgcccttgaaattcagcagaagggggctgggtgcagtggctcacacctgtaattccagtactttgggaggccgaggtgggcagaccacctgaggtcaggggtttgagaccaccctgatgaacatggagaaatcccatctctactaaaaatacaaaattagccgagtggggtgacgcatgcctgtaatcccagctacttgggaggctgaggcaggagaatcgcttgaacctgggaggtggaggttgcagtgagccaagatcgtgccattgcactccagcctgggcaacaagagtgaaactccatctcaaaacaaaacaaaacaaacaaacaaaaaaagaaattcagcggaatgaggagtcttaaaaacctaaaagctagaaggggttttattggattatctaatctaacctctggattttacagcaaaagacattgacattgggccttagttcaaagaatgactagaggtagagccagtggaatttctcctaacccaacgtttgtgatcttttcattacatcatctaagcagaacctgtaggggttaactctgagaattggggatgatgcttgtgataatgcagcaaaaagtaatgtctaaatgtaagatattattttgagatgagaacaccgaatggggatggaagacaggaatcttcaccatgtgtgaatgtacaggaaacaaccaataaatgccttaattcttgttctgtaaaaacttacatgtaagtaaaagatcgccgaaattgatctgaactctgttactgccacaaacttttatcagcaaatggagattaggatgttcccactgccagatggtatataggaatatggttgaatgtggactgttatcacagactgtctggtttcaaaggtgggctctgtcactcaatatagttgtgtgacttagttaagtttgtaccacttacaaaacttcttccttgggtcaagctactcaattttacttgcttctgttgcccaatatacaaattacagtagtaatacatactccatagggttattcttaggcttaaagtagccagtatttgtgaagttataggaacactgtttagcatatagtaaacacatgtgttatctgtcattattattacttgcttttctgttgcaaagactaaaagctattgttttggagtagggaaatttccatttaaaattccattggctaggttagcggtatcagttgatttagcaaggaattaagagatgaaaaggaattatttctttcgtggtggcttcatctttatctgtatccactataaaattcgtaaagtgggcgttatttgctttacacagaccagaaaacaggctacagaaggtaactgcttggccagaaatgggttgagtcagtcgtggcttatggcacaaactacatttgagtctacaaagcaatagatgaaggtcttcgccaagtgaagactttttggacttggaaagttcacacacttccagcgctctataagaagatagggtgggggagttggaggagaggacccacatccctcttccagcctaggaccaacttggcccagaggccttttcccatgccgcccaaggctcgctgagaaatctggctccacacagtgggagaacccagggtcaggcttactgtgagtgaggccggcccagtctttcccgagccttcctcagggagacctgggggtatctcacttccctgcggaagtctgtggagtttaatttgtaaatttgtgccgaaactacacttttgtgtcaaagagcaaggacggccaagaagcggcaacacgaataagagcgcagggaaatggggcctgcgaacgacctcggcctcgggaactcccacagtgccgccccacgcgcgacgcctacccgagaacagccacccgcctccgctcccggaggaggcgtggtcgaccagcaccgccatcttggccgcctctctaggcgctctgtttaccactctatggtcgcctgctcccgccccgccccttcccagtcattgtctggaggagcagccgcggccgcagctccttctctttataagcccgcagttcccggatgtgaatggattacaatgtatctttcagggaaacctattattatcaatgtgactccacgggggagtccatggtgatgatgatgaggaggaggatgatgatgatgagacacctctaaacttggaacaagtttaagactttatgagagaagaaaaaaaatcaccaacaagaattgtttgaggaaaaattataactatcctgtgttcatttttttttttataaacaataagaaaaagttgttggatttttttttaatgatttcttttttgggggagggaattttgttgcagttttatggtggaaaatgcaaaaaccagagccaggtgcataatcttgtaatctgtggatatccctggagcaggactgagtaccagttaaaatactttttggggatacacatgtgagatactaagtacttgcagaagatttttgtctctctttttaaagtctctttccttggaatattgtgagaatatttgtggccatttaaggtaacgtttcaatttgccgtcagagtaaactgtttgtaattgaatttaatttttaaaatgtcgatcccgatgttttattaaaacaaaagggacaacctattaaataattgccaatgggaaaaagtgtgtgcatgcattttgtgtatgtactcgcacatctagcaataccaggatttgtagaatgtgtgttttttttttcaaacacacgttaaaatagcttatgttgcatataccggataaagcacgcttgttattacgaaacgatagaattatgaagcttaaattttatcctaaaaagtgatgtgaaaaagtatgttttaagagcatgcagggcctataatggtaaatgttgaattaaaaacttacagtgctggcgaacagggacttagcgtgcctaggaactcaagtgcaaaaacaaaacaacatccacccccaaaaattgccctttttttttttcgaagtttgcagttatactattctgtgacttaaaagggaggggaaagaaagtatgcaattcagatttcgcccccaacgcaaaactaccgaaacgaaaatctccccaggaaaatgtggcttgatttatagacgaaaaagaaaaatattgttcctcttggcaaagtctttttgcatcacgtgtatttgcagcctagtataaacttgctttgccgtgtgtggatgtgtgagtgagagggaacgagagtaagagaaagaaagaagtgaggggatgtaaactcgaataaatttcaaagtgcctccgagggatgcaacgggcaaaaactgaactgttcaggcttcagattgtaactgacgatctgaggaaaaatgaggtgctcgatgaattttcgtttgtattttttggcgaggcgggggaggtgttgagattttttttttttcccctcggggtgggtgcgagggggatgcatcctagcctgcccgacccggagcaagtcgcgtctccccgccggagcccccccacccatttctttgctgaacttgcaattccgtgcgcctcggcgtgtttccccctccccccttccctccgtcccctcccctccccggagaagagagttggtgttaagagtcagggatcttggctgtgtgtctgcggatctgtagtggcggcggcggcggcggcggcggggaggcagcaggcgcgggagcgggcgcaggagcaggcggcggcggtggcggcggcggttagacatgaacgccgcctcggcgccggcggtgcacggagagccccttctcgcgcgcgggcggtaggtaccggcgcctgcggggctcggcggggcggaggcgcccggcggcgcggggttcgggctcggcggccccgcacgcggctccgcgcctcccgcgccgcgggctcccggcgcccggcgctcccagaagagacaccccttcccctcccgccgcttccctccccctcgccgccagcccccccgcccctccccttgatgccccctcggagggaccgaggactttgccaggggcctgactttaatttttataacccctttctttcacaaattagggtgctggacaattagaggacccgaccctccactccgctccccccaaccctgtcaccccacccctccccctttggacgtgttttcactccagagacgctcatctttaatttcttgatagctactttgaaaagcggaggggagtggtgtgtgcgagtgtgtgtgcgtgtgcgagtgtgagtgtgcgaggggggtggggtgcagggtggggggaaagttgagatcggatcgttctcagtagtttctcttttctctgtgatccattcatttctcgctctacctcctgttgcataaaatgatgcgctgaagagcggctttttttttttctttccctgatttggttttatagtggatgttaccagtttgatcgtctctttggaaatacaatatcgctttttttttttttttttttttttttttttttttttttgctattgctgcctattccatcttaaaaaaacaaaaccaaacccaacccaacaacaagtctcccatcccttcctcctttccaccttaatcccacccgcccccacgtccccacccccaaccccccagtctccaaaaatccgattgtgttttctccaaggattgggactggattttctgattgcggttatttccatgtttctaggtttgtgtgattttgctaaaatgcatcaccaacagcgaatggctgccttagggacggacaaagagctgagtgatttactggatttcagtgcggtaagaaagaacggtggaaactaacaacagctgtgaaaaaaacaaaacaaaaacccaaacacttcagctagaaaccagtaggaatctaaaggacagtaataatttttaattggctgaatccttggtaaatatgaaggtctttttgacaagtttttaactataattttgtggtgtgatggaagattcaggcttttttttttttttgagttttattactggccttcaattccctacccactgattaccccaaataatggaatctcaccccagtggaaagcaaaaatagacacccctaaaactaaaccacccctaaaacttggccatgtctgaacactgagactactaatactttgcacactactcttcgttttatttattgtttttggaaatggaaaatagaaaataggagacccagttgtctctttaaagttttaagctaatgatgctttggattggtaggacctgttccttacatcttacctcctagttacatcttttcctaggattcttaaaactagtatggatatgctgagcatacattctttagaaccttttggactgttttggtaaatttcgtagtcgtaggatcagcacaaagcggaacttgacacacttgtggagttttacggctgtacttggtccttctccatccctttgcttccttttcctaaaccaagtcccagacatgtcaggagaatgaattcatttttaatgccagatgagtttggtgtaagatgcatttgtaaagcaaaataaaaagaatccacaaaacacacaaataaaatccaaaccgccttccaagtggggctctttcatgctgctgctgctgctgctgctgctgctgctgctgctgctgctgctgctgctgctgctgctgctgctgctgctgctcctcctcctcctcctccttctcctcctcctcctcctcttctagaccttcttttggagaaatggctttcggaagttttgccaggaaacgtagccctaggcaggcagctttgcagccccctttctgcttgttgcactttctccattcgttcctttgctttttgcaggctctgactcagggaaggtgtgcattatccactagatacgtcgaagaagagggaaaccaattagggtcgaaataaatgctggagagagagggagtgaaagagagagtgagagtgagagagagagagagtcttgcttcaaattgctctcctgttagagacgaaatgagaatttagtgcaggtggcacttttatttttatttgggttcacatatgacaggcaaatcctatacgagatggaaatggacattgccacgtttatggccaaggttttcaatataaaacaaaacaacttttttcttctccttggtgaaactagtgtttttctagagaggctgctggcctccaacctgaatcttgataacattatggggactgtgtttgttccaaatgtagcagtagtactgcttggccatctaatgaacctgaggaaaaagaaagaacagagtgataatgggggctggggtgggatctgtaatgttgtttctcttttagttttaagttggatggtgatgtattttactaaataaacccttagcataaactctaagctgtttggtaacagtatgaaagatctttgaggagctctgaaggcacaagtgtcttcttttcaactgtaatatttctttgtttcttttagatgttttcacctcctgtgagcagtgggaaaaatggaccaacttctttggcaagtggacattttactggctcaagtatgtaaattcttttcttagtgttaagttaaatgttctgggctgtttatttactcaattgtatgtttttggctctgttgaagagttctgaaaaagtcattgaattttagcctgtaatcatacggttattgcattacccatcagtggtataacttacacaaaatgttatcttgtgcgattaaaattaggtctttttttttaagtcaaggaaactctctcaaaattccatcacttaatttaagagcaattttctaatacagttgtaatcaaacacatgaagataagaccagtgttaacatggggaataaattaatgttttctatttgaaaataaggggaaaaaatctctaacattcataaaatgggaaaatcccttgtaaataatatcatttattaggtactgtatacaattaacccttttaaagaaatgaacacttaattctgcaaatgaatgctatgtagtaaaccatagctgtaaatagcctcttgctaatcttagaggctaaatatgaattcatttatatttaaaataccctttttgatgctttagctgtttttttttccctaacgatttacttgtgcaatgaatttttactgtatttaaagttgcaaatctggaaggacttttacgttttataaatgaaagatctttgggtgatgcttaaaaaagatgctagcactattcacaaaggaatctgtgtgcacagtgattatctggaatctaaggaggggtttattacagggctattcgaatatctcttattaaaagtgcagagtgaaaatattcatttaaaatgtattttttttaatccaatgaatttcaaataagaaaaagttatacattgttgcctgctatcctttaagtccgtggcttaagtccatttatgcttgttaaacagctgcagtattttaggagttctggcaatggtatataacagtacattaggccaagtactattcttaagtcagactggtaaatgttgacatcttttaactgtgagatgccagtggaattgtctgtcaactatgaatataatttaacatcttttaatattcatttggtgctatagcaatgaaagaagtttgttcacttatgtgatttgtataattggtatatttttataaaactaatggctttaaaagttgctcatttccaaataagttccttctccttctattgcctgcctaagtttagggaatttgtgtctcgataacttgttttaaaaaatgtgagatgcttcttgtatttttattttagttttctggtgcacattgattaaaaggaccattgacagacaatatgtttgtgttttactatcctggacctggttatgttttccacttagggatttgggatagtttttatattagtattatatctttaaatttctgtatggtatcctctatgcaacttttaagatggaaaatattaatatgcatgtttgatgtaaaggtaaggacaagtatcttttgtgggcaaattaatttttcatgttagacaagatcaaaactaactgtttttgacagtaatttttttatgacttaacttaaaaatgtgtattcagtttcaatctaaaagtagcttatgtcagacagacacagagatagactacttttaaagtcaatgctaaaaaactagtttgcaatgttgtgaaaatatgcatttagaataacttaagtatattacattagatatttaataaagtaaggtgtttagaaatatgagattgtgttacatttaaaaagacaactgtatgtctgatccattttctatgttcacatttaaataaagttcttgctgtgatgtttaaatgtttatagagagtacaggcttaataagttgaatatgtattaatgcattttggtaagtgatgatatatcaacacttacacagttctgaagacaataacacacacacatacacacatacacacatacacatacacacatatgttcatgcatgcaaacctggagagagacttcactcttaataagtcatgttacactgcttctaatgcatacacagtgattattttgaaggtgtggaactttaagttacgttgtaccagaaatggtgttttcaggaccaaatgtttacttgtaagggtaaaaagtgtaatggtccttttattctggcagcctgaatgagaatgcagggtattcatttcatgtagtatgatggtgattataatatgtagggtacagattggagtgttcagttttcctctatcaagatagtatttgaacacagggctgttagttaagaaaacgggttgtatttccacttaaaagagttaaatcttttaaaaagcgtaatacattttaaaaatcatgaatactgcattttgccctttaattggaaggatcaactaggaaactttggagagagaaataattttctaaatttacctcaagttaatatccattgtcttgagtggactcagatgtccctttcatggattgctttgaaacttggatttaggaaagatctaaactataagtagactgttcctatttgaaaaatcagctatggtttttcaaagtgaggcatggtaataattcatgcttaaagttcccaatagcttttgattccattaatataggatgctccatagtgatttgcaatgtgagaataaaaataaagtgtggccatattccctttaatctttcatttcacaaacatggtttttcctaccaccttaagaaatggtgaggctgctagggagaatggaatgtaacctgagctacagcctgacattcccagggagcatttttcacatgaaaggcttttgtcaacccaggaaaggactagcagtttttgtttgatgtttgcaggtgttcagcagaaagcactaaaacaattcagccatgatggttcagagcttcgatgaccttaacagggaaaattggtgggctctggaattatttttaagaaatagttataacctatatggtaacttaaacaaagggatttaatatccgttatatcattgatcttaaaacaaactaaaagcatccacatgcctggatgattggaaaattattctcattgaaaagtaggatacctaagttaccaaaaaaagaaaatcatctaaagagtctataatttattgatgagtatggacttaattttctgatatagcagaaggacagtttatttggttacttttgactcttgtgaggaaaagataaacatcctagctttgacatctttttaaaaagtcgttttaaagttgggccactaaaatgatacattctaaagaacttgttagatcaggtctggtcacatctgttacatgtatttactgctggtctatgacagatactacatctttctcccttagtttaaaagttgagctttttcccctgtgactgtttagttttactgaggtgttcaggtattgttaaaagattgtcaaatgaacgagtgtttgaacaattaagagcagcgttaaaacacaccacatctctgttgtgggtcatttttggaagaggaaagtattgcctgaaatttacctaagttagctaacctatatccacatgacaccaacataatatgccaatttagtgaattcattgaggcggaaaaaaatcagtccggtgggtagttttgtatgatacagaaaattaacgtggtcacatcctgaattagttttgagttcatagtgatggcatgaaaaaaaaattggtttccccttaaagatatttgttgaggagagctgcttaatattgtgtgtgtgtgtataagtgagtgaaaacacccttaaaatcgtaaatggtataattcataagggttctgtggctttttgtaaagggcagagtaatttaacaggttaaaagaagtacagtggcgttaaacccattatgttagaatcacagaattttgggtatagaaacccattagaaatgttgcccagtgccttcattatacaggcaaagaaaactgaggcccaagataaggagttccaaactgtgctttcttatttgttattttaaaaaacaagtttttatttgctaattctctatggccctgcaaatcctttattggaaataaccttggtctcactgctgtctttctgtcctttgtactgcgtaatggggcttgaggattagtgtgctgatatttgtgcatgtaaatgcttctgtatatgcatgtgccttctgaaaacttttttaggtttggagctgaattttggattattgatcattctcttttgcctggtcttccctgtgactgttttgcatgatgttgggtaaaataatagtgtgggtgagcatgtcacagtgcttctcagtgtgttagagaggtgtgctgtgtaccttatacctgttgtattttttaaatcctaacaagaacctaatgagatgcaaggattactactatcctgtattcatagctgaggaaacagagacagatgttaaacaactggatcttaaggcagccaataatgaaattaggttttaacctcaggtttgtctagctcaaagtcctgagttctatacacacacacacacacacacacacacacacacacacatcagacagctcatttttgcaagattatataggcaaacagtgtgatattgaggcttcgcacgaaatgctatctgtgatctttagggtagatagcatttttaaaaatgtgtctaatgttgtaatgatgtcaaccatatccattatttttcccgcctttgtatccaaataaactacccttccaatttatgacagatatcaatgtgactaaatatgtctttctcatatctttattagttttactaagaaaatacagtagatattttaaaagttgtgctttcattctgttgtaagttgatagtctacatggatgccaatgaaaacatgtttttatgtagctaatcaattcagaatttgaggtaaccaagcctgatgtattaatatgtaaaaaaataaggatctcctgtctttaaatataaaaaagttttgcagttcgttgttagatctttgaaacttaatattcaagaacaataccctcaattctatctgcatcactaaaataagcagttttgaaggtttgatatgtctgttaccagacatgtgcttaaaatgttacattttctaaattcagaaggcagaagcagtactctatttgacactgacttaagtaaataaaatgcattaaacaagcgtggggatccaagaactgttgaaactgaaatgcttaacatttttgacagcatcagcaaattatccttaccctactattgtaatgaggaaatcacttaaataacagatgaacagccaagtcacataaacatatataatagaactatgtaatgaaagtttatgctgttaattgctcgaatctgtcttaaatgcttagaatcatggagcagtaaagactgtcatataaacagttttgttttgagcttaaaattattcctttttgctttcatctgctatgataaacaaagtaattttgtaagctttaaagatcaaacatttactcctaatggtaaactacattttatattggaagtttgcaacctcgtccaagtcatagagttgagtcctggtggccccaggcctgtgattttcaacgtttagtattatgatgctatttagatctgttcccataagccaagataacagatcttaagttgcctaataaggaacatggtgtgttttgaaatgttcttcagtttacaagtcttaaaccaaaatgttcttggccaaacctttagaatctatatgtaagttgaataagtcagattttatacagacatagcatgaaaatgaagctaagtaggaacagaaaaatctgccctttctttattatttttttttttgtattttatgagctattttttatggccaggtgtttgttcttccaagttaattagatagtgctaagtattagaaaatgtaaaatacattacagattttttaaaaggttatttttgttactggtttcttattactctgggtaaaattttcacaactgaccaccaggtttattagcttatatgtgagctacccattttgtacattcgtgagccaattgactaggaataaggtatgcacatgggttttatgtggatacttttgacccatatctctcttaatacttaggagagagatataagagaaataataatttaatctttggagaagattaacactttgttataagttatatataggtaaatatatatatatatatttatattagacttgcaggaatagtgaaaatgttgaaaaggttgtcatgtttactttcatttcaaagataaaggcccagttaatcagcatatcaaatacccaggtgtgtttaaaatcagtttatgtgggtgaatttcagggctgtaagaaagtattttatttaaaggtgcagccacacgattgattgttcaaatgggtgcttttgtacttttgtgtgacaattaacatttaatgaatgactttctggactggcattggtggtaattactatatgtagtttattaactgcaatccattgttggatgtgcctttattgatttgttttgcaaacaccccttcacatgtgcggcagtatttgtgcagccgtatttgtacgttactttttaaagaacctgtttcacttgctgatgctgacattgcctctaaaaatgttagtttataaattctcatgtgccagaatgtctctttgatccaagtaattttagctgaaatacaaaatccgtcaacttttctgctataaaaagtttgcattcaaatcctcagggaatcccaaagtaatgacacaatattgtttttcaagtaaataatttatggaaatttacatttataagagactttagagatgctctattttttaggtaaggagccaaggttcgggagggttaaaagtcttttgcccaaatcatgcagttggttattggctgtaataggacacaaatacacatgtcctgaccctctggtcaaagacctcatgctgcttttaattaaggcttggactcaattcgatggtaccaactgtatatttcttaagaagggaaaaatgtgtataatctaccatttctgaaaaaattattaaaaattgagattgtgaaagatggacgttgtaatccagcccacttgtcatcacgtgttctaatttggccaaggcagttgacaaataactgttaaaatgtattgtgttattaaaaataacaaagtaagacccatgattaaatatcagggctgtaatttaatcttgggggatctggtgctgttcataaaccatttggcttttttctgtaacggatgacgtcaaaatccagcttgattgaattatgaccctgggttacagcagcacctgctggtgcctttttacttcatggcctgtcagcatttccattacaaacttttttctctgacattttaaacttcaaatagttaaactggactgatggttggcatataaactttctgctccttgggaaaagaccacttgctcaataaaaacagagaaggtggtgacaaagccccattacaggataccccttagaatgttctgctttgctttaatcttccattcatttaaacattcttttggggggtacttagctgaattgcaaggcatccaaatggaaggtttttaatctcaaatttcccatgtgaagacttaagtatggggtgtttacaggactggtaaagtgcaaaaagacctagcatctatgcaggttattgaaactctggacaatccagttttcatacagtgtgtaaaatgctgaggagcaagccatgaaaaacatgcaaattggcataccttgtcagtaattgcttttatattcacttaagatgagtaaaaattgataatgattatggttagaaaagtatctttatttatatttatatctggagactggtagcatagcttcagtttgtccccttgggttttaatatgttgggaatggagatgggatgttgtttgcatctagctagtcagcttttcatctatctagtctaattctgattgatggatcatcatatatatatatgtatatatacacatatatgtataaatatgtatatacatatataaatatataaacgtatatatacatttatataaatatataaatgtatatatacatttataaatatataaatgtatatatacatatataaatatataaatgtatatataaatatataaatgtatatatacatatataaatatataaatgtatatataatatatatatatatttagtacctgctattctcatatctccatgttagcaattagaggacatagagggctttatggaagagagaaccttctctcagagggcatatattctaacacaggggtgtccaatattttggcttccctgggctacactggaagaagaagaatcatcttgggccacacataaaatacactaacgatagttgatgagctgaaaaacttttgcaaaaaaacctcatgttttaagaaagttcacgagtttgtgttaggctgtaggttggacaagcttcttctaacaggagaaaatagaaaagtaaaaatgtgattaacatctagcattgggaagacacaataatgtgggagtttagagaaatgaaaacttatttctttcatggggaaattaataatgaagggttcatggaaaactcaattctaatccttgaaggaatggtagaattttgacaagtaggtagtgagactgagcgtgcatatcaggatcactgtgaaccaagcacagatgaaagaaactggaaagggtagattaaagagagctcccagaaagagaagtttcttggctctaaagtggagtcaactctggtctagacacatgggatgatttccaggcaaaaacccctgtcttggttgccgtttattttcttgactgagtttgcgtttcactcgggggtgttaccgattataatccagttccatccaaaagtatatgtttttaatggtagtgtcgggatggaaattgaagattttgtgtccctacttcccaaaattcttcctataatatcactcagcagtggaaactttcttgagccaaatgaagctgctttggagaaaattgttcatgtagccaaattctggaaatctaggttcttttgcaatgtttgctggtaagtagctgtttcatattgaggaagtggtagaatcttaaaggctgcacctcaaaactaaacaaaatcgaaactcaccagtacaattcaagaggggttttcacattttttaaaaaggaatactgctgtatttaaaacattttaagattgcaaaaattcatcattataatttttattatcatcactggcatcaccatgaccagtgtcacattgtttggtcaaaagctggaatggaaatgtgatagttatctttgccatattatatattgagaaatgcgtttaaaacttttccggagataccgtgatcttagcaaaaactaatgtaatatttgtaaaaacattgtgaagtggccagatataccttttaatgaaactgaccagaagtacatcacaaatagaaaaatacacgtgtgtgtgtatgtgtataccatcccttcccccaaatattgttcagattaaagtgtctttctctctgtgacctgcaagtatcttaacttagcatgtgtgtccaatttccatagtgaagccaaaaattcaaatgatggttgatattggcttaggaagaatttattaatgaatgactgtgcttggtatagagtaaaaaaaaaaatttatgacaaagaggatattctagactcatgtaaaagatttcagttaagaacctatgaattcctcaacctttttcttcacttttcaaaaagtaaaggatttatattggaaatattttgcaaccctacaacctgaaactcaaagctttggtcagcaggtggtaataatatttccaggttgaatatccaatttcatacataacccaatttgtaagtttgaaaagaaatattaaacgatgtcagttttaatgcttgtttgaataattgttctttgttatgtgccctcttggacattattgtccactagtgccccaaaccattgaatgcttttctgttctcttatggccactgtgattcttcaatctagttacttctaactgcaagattaattttcttctgacatctaattttcccctgattttattaacatcttattattctttttctggctcattttgaacaatttctcttttatatggggtgtatatttgtagtgtcccacttgtaagggaattctacactttaatccttagtaattttggtagaattgggataagatgagagatagtccataattgtttaaggcttgattgtttaaagaaggttgaaagcttcagaaaagtggaagtggatgaatgcatgccatgttcttattattttttcagtgtgagtgtgtttcactggagtaacgatagagttattaggaattattacctttaatttacttatgtgcacattcattcgtccactcattcattcattcattcattcagtgaaagtttttttttttttgagagccaagatacaagttatagtgctagaaattatggtgctacaaagaacaacaaatttcaacttcagcactgggacattatgttgcagttgttaaataaaagttctacagtaattcaaagaaggtacttttgaaataaatgatgttggccaggctgggtggctcatgcctataatcccggcactttgggaggccaaggcaggcggatcatttgaagtcaggagtttgagaccagcctggccaacatgatttaattattttgtagaaatcccgtttctactaaaaatacaaaaattagctgggcgtggtggcaggtgcctgtaatctcagctactcgggaggctgaggcaggagaatggcttgaatccaggaggtggagtttgtggtgagctgaaattgcgccactgccctccagtattggcgacagagcaagactctgtctcaaaaataaaataaaataaaatatgttgaaatatgcaagtatactttttcaaaggacacttttcaaatataaccaagtacagacttcacatttctaactgaaacggaaatcctaaaatctctgtatatgtgtacatgttctatgtgaatataaaggaaggcgaatggatttgaatgcttatggaaattggcccttgaagtgtagtgttaggaatgtactctgaaatttagtgtcagaggttgtctgggaggcaatgagaattaagttccattcgtcctttttgagcagaaattaaaattttggatgtgtagatggtactcatttacttctaggacactagatatacatgcttatcttttttatccccacacttgaattatgttaatatttgtgtttaaattgatacacagtaaaatattcttttaaaattaagtagatgattattgagcatctaccatgtgtcaggtaatactttggcagctctatataaaatgatgagcaagacaggcatgtttctgatgttgcctacatggaggacacagacattaatggataatcagccaaagaaggtcaagtactacatttgagaggtgtgtggcctgagaagagtttgcaatagggatatctgatcaaggggagcagtcaggaagggctcagagatcagcccaggtgaactgtggtcttacagatgaggaggagttaagtggatggaggttgcttggctgacaggtagggcatgattccagccgctgtggctggtgggggttggtaggtgtcagatcccgcaagactgagccacagggagccttgacagtgtgctgctaatcagatttgtgtctgggacatggacccaaaggggagtcactgtgggtggcccacaccagttgtgaagtttttgcagaagtttaggtgagagacagggttgctggttctacagtgtgggtggtaaagttggagaattaactttgtagactttatttgaaatctgtacctttaggtcattggggagcattcatagtggctacttgtttttttttttttttttggtgaaacttcctataactttctaatacttgaaaatctaccatactttatacattccgacagtaattatgagacctaattcagctgtgtgatagccactgcctttttagcaaccaagcactaactagagaagtgctcttttattttctgagaaaagttagattgagtttgcaattctgcgagggtacaggggtggaagtgggtcttattgaatggtcttcagtaccattttggctttttttttttgagacggagttaagctctcattgcccaggctggagtgcaatggcgcggtctcagctcactgcaacctctgcctcccgagttcaagtgattctcctgcctcagcttccccagtagttgaaattacaagcatgtgccaccacacctggctaattttgtatttttagtagagacagggtttctccgtgttggtcagactggtctcgaactcccgacctcaggtgatctgcccacctcggcctcccaaagtgctgggattacaggcgtgagccaccgagcctagccctgtttaggctttttatagcctatgttcttatgagcagtaaacattatgatggtttagttagacctgttgaattgaattcacttctcctgcctgtggtcaggtatcaggtagcacagccacagaagttactgaatgtctttgttggtggactttaggagagtggtttaatttatgtggtattctatctgggattgcagcagtattgttagattgcattttgtcacagggaggaaattacctggtaactcctgattaggaacaaaatgaagcttcccctttttacaaatcctggctaacattccatttggctctcttctgttgaccacctctctctctcccctccctcctcactccattttctcagttattttattgtttactattggaagtcacctcccaactcaggatacttgttagtccattttaggaaaaatatcaccattctttcactattattctctgttgaagttgaagaacagaatattactttttttctttccattattggttacaccagctagttagagacttggggtaatactgtgggcatgggttggatcctgatatctgtgtcagttagtgagagttggttctatgaccctagagctctttgtgtccttcaaacgagggtgctgaaacaagacgaacatagaactgtctataccaagcaaaaaactcctgaaagcacatgcccactgcaggtgaattggtagcatagtgtggagataagtgggcagtgcttggtcctgtttctgcctcctagagagtacctctcagcatccagggatgctttagtaactcttagttaaaacgaaatgaactataattaattacctttcttttgggagggacacagagagtttcaacagcatctacaatgctttttttttttttttgaaaagaaaatatgatagaatattaagattgacagagctggggatgggttggaggctgaattatgatgtgtgttttctttatgcttgaattatttcataattaaaaacaaaacatataataacaaaaaaaaaaacaccctctacctctcattcacattcccctctggccatagcctctttcttgacttccttcctagcaagacttttgttaagtgttttctacacaggctgctactgcatgcttcaaaatttaaccccaagcaaatattagaaaacatattttatcttataatacttgatacctacagaataatctgtgtaacaaatgtaagttgtgaagcttaataatggagtgaacatctatgaacccaccaccaacataagtactggagcaatgtcagatccattggccggcctgtgggtttgttccctgtccaccttcccctatctttcctgccagagagaaacattctcatgccctttttaaagtagtattgtgactggcatatgtatccctaaacaatactgtatgttgtttggttttgcttgttttggaggattataaaactgatagattgttttgtgctacttgctttttcacttggtatgttattgtccatgttgttgcatgtggtgtatgttaattttctctgctgatgaataggttgtagtttatttatgcatgttccagttgatgaacctttgtgttcctcttttttggaactacaaactttcttgtatgtttctcttgatgcacatgtgtaagactttctctgtggggtatatgagtggatatctatgagtagaattgttggtttgtagagttacatgaaagtccagcatggcaggatagtgtccagttgttttttaaagattcttactgatctgcactcccacctgtagcataaaggattactattggtgcagtctactggtataaaatagaaaatgtatcccattatagtctttttttttttttttttttgaggcagggtctcacatctcactctgttgctcaggcttggagggcagttttgcaacctcggctcactgtctggtctcgactttctgggctcaagttatcctcttgcctcagcctcccgggtagcaggaccacaggcacacacatctcacccagctaatttttgtattttttgtagagaaggggtttcaccatgttgcccgggctggtctcgaacttctgagctcaagcaatttgccttccttggcttcccaaagtgctgagattataggcatgagccaccacacagggccgcattgtggtcttaatttgcatttccttgataattcggttaaacaactttgtatatatttatttcagatcattcatgtccactctgtggaatctaccccgcccccattttctattgggttatttgttttttcttattgatttctaggtgttcttgatatatttttggatgataattattagtcatacatgctgcaaataccttctcttattttgtgacttttactctctctatggtagctcttgataaagtccttaaatttaagatagtcacgtaattattttgaagggttggaaaagccttcttaccccaaggttgtacatatattctcttgtatgtttcctctgaaaaggatttgataattttgcctatcacatttaagttttccatgcagttgggattgattttgtgtggaaatccattcacacgtactgaaaagtccatcctttctccagtcattcacaatactatttctgtgatatttttagttcctgtatttgtggggtctttccttctgggccttttattctacttggttagtttggctaccttgcctcggtatcacattataataaatgttataactgtattttgttgtttgttaggtaaagcccttcctccccacttttcgtgtcccatatgtacacatttgactttgggctattgtggagcctgagttcttctacgtgaatttaaaattcagcttgtcaaggtctttgagaaccctttgaggcatttttattgaagttgcatggaaactaaagatcaattttgggagaattattatgcatttaatgattatctctactcatttatatctccattgttttaggtgtctgatatctcaaaacaattctttataattttttagctgtaatttcgtaattatagttttataattttctccatgaagttttacattttctgatgatttattcttcagtaccttatttttctgtttctattattaccagtatatttttttaattattcaaattatttgttacttgtatatagaaagtcttttttaaaatttttatttattttttatttttagagatggaatctcactctgttgcccgggctggagtgcagtggcgtgatcttagctcactgcaacctctgcctcctgggttcaagtgattctcttgcctcagcctcccaagtagctgggactacagttgcccggcaccacacctggcattcaattgatttttgtatatcaattttcatattcagccatgttgctgagctctcttattagttctaaaaatgtctttgtgttttccttagagttttttctgtagatctgtcacatcatgtgtgactcaagacaattttattgttttttcctttcaaaccccaatacttggcctttttttttttttgtctttactgtgctatatatgaccttaagtacactgttaaataggaatggcaatactgattatcttgtcttattcctgattttcaccatgaatagtgatgttgatgttgatagatacttgattaagaaagtttcattctattcatatttcatgaagagtttttatcatgaacaggtattgaattttatcaaatactttttctacataaaattaaatgatgacttctttatttcctttaatctgttaatgtcgtgagtgacatccgtatattttcctgtggtaagccacctttgcattttgtggatgaaattaatgatgtagcttcattactcttttaaaaatattgtcctggactcaatttcaaatattttcttcagtatttttacatctatgcttacaagtaagattggcatataatatttttttcctcctactttctaagtctagttttgtctacaaagttagaataaggaagtgttctcactctgtattctctggaatagtcttaaataaggatgaaacaatctgttctttgaaattaggtcaaacttatctgtaaaattggtcctagtataagaagattttaagccactgatataatttttaaatataataatattgagagtgagagctttactttttctgcagatactttaacaattaaatatatatataaacttatatggatgtgtgtgtgtatagatgtgtgtgttgtatacatatatatgtaatatatgtcagttttctctctatttcatttacattttaaaatttattaccataaagttatacaaaggtattctcttagctttttaatctctgctgactccataattttcatttttcattcataactttatttatgtattccttctttttttcatgatcaagctaatttgaagtttttcttatttattactcttttcaaaccaacttttggctttgtggattatttttcttgtgtgttttctacttcattaatttttaatctttgttatttcctgctttctatgtacttaggcttattattctgtttttttttttttctaaatagagttgactacttagtgcactaatttatcataatttctttttataatataagaatttaaggcaatataataccctctgatgactgtggtgactgtattacataggttttaatttattacattttcatcatcttataagtattttaatatttacagtatgatttcttctttgatacttgcaatattttttggtgccttcaaaattttacaaatgaatgtattacttatctttttattattgacctctattacaatttaattgttgtcagagaactattctgtatggcaacagttctttgatatttgttgaggcttgctttgttgccaattttgtgaatcagttttaaaagttccattgtgtgcttcagaagaatgtgtactctatgaattcagggatctatatgtgtccagaaattaaagcttgttgattgtgtccttttttttttttgagatggagtctcgctctgtctcccaggctggagtgcagtggcgcgatctcggctcactgcaacctcagcctcctgggttcatgcaattctccttcctcagcctcccaagtagctgggattacaggcgtgtgccaacacacccagctaatttttgtattttcagtagagactgggtttcaccatgttggccaggctggtcttgaactcctgacctcaagtgatccacccacctctgttgattgtgtcttaaagtcatctctacatttgctaatattcgaaatctgcctgacatatttgttattgagaaaagtagattgaaataatttgctatgatgatgaatttataaatttttccctgtatttctattttgactttatacatattgaaattatattattacatgcattcattttaagaattactatattttcctggttaattaaaccctttattcagtttgtatgtggctattctctttctgcccttttatcttaaactctgttttgtctgatattggtataattattgcacttcccttttgtgtagtatttgtctatatatctgttttttaattttttgttttcagttattccatgttgctatgttttaaatatgcagagtggcattttatttttcttagtattctgatggttttattctactgttttctgaatttccctgtggctcataagaagttcagtatctttctgattgccattcttttctagtagatctacccttttccctgactgttttttggcatttagcagttttactgtaatgtatctatttgtgaattttaaaattctatttggtctacattgttcttcatgcatctgtggcttcatgtctccctccaattcagaaaaattatcagcttttatttccttaaatattctgactcctttattcattctgttctcttctttggggattccgattacatgtgtgcttgaccttcttttctgtccttcattctcttaacttttctctcatattttcagtccccttgtatctgctgcattctgggtaatttctttagacccatcttccagtttacaaattctcccttcaggtttctctaacgtgttatctaatgcaatgattaattttttttatttcattgcttactttttcatttctaaaagttccatttggttctctctaaattatgcctactaatttttaaatactttcttatttcttgttcatttttgtgattctgtctttaagttcttcttgtatttatgacagtttttgtattatatgtatttatttatgtgtataaatttatagggtacaagtacaaaacgtgacatgcatagattgtgcagtggtcaagtcaggactacattgtacccattaagtaatttcttagccacccgcctcctgcccctctacctttccggatctccgttgtctctctgcccactgatagactacatccatgtctatacatttttatttttattttatttttatttattttttagtttttgaggcagaatctcgctctgtcgcccaggctggagtgcagtggcatgatcttggctcactgcatgctccgcctccctggttcacaccattctcctgcctcagcctcccgagtagctgggactacaggcacccgtcaccacgccgggctaatttttttttttttttttttgtatttttagtagagatggggtttcactgtgttagccaggatggtctcgatctcctgacctcgtgatcgcctgcctcagcctcccaaactgctgtgattacaggcgtgagccaccgtatctggccatccatgtctatacattttttagcacccacttatgagtgagaacatgtaatatttgcctttctatgtctggtttgtttcacctaagatagtgacctccagtttcatccatgttactacaaaagacatcattttattctggttttttttttggcttcatagtattccattgtgtatatatgctacattttctttaataattgtaaaatagactatgcaattttatagatattttctaacaaatccaatgcttaaattccatgggcttgaggtagtcttgttatttctactaaccctcacttaagcttctttgttttgcttttgtgagatgcttatgaattcacatctggtgggtattgaatctatgaaaatctgggagtctaaagtgagaatactttctccagagaggaattgcttttgcttcatagtctctttcctactctgggagtcctagtcttcttatcacagtgctgatactggcatttgctctcagagcatccctgcttcttgtgcctacctttcagtattgaaaactcaagttttgttttattttttggtgctttcaagatttccttatttcttgcatttatacttttggagaattttttttttttttaatgttgaacattggttgttttgtagtgtgagaggccttgggtgtattgtcatacttttggaagcagaattctgatttactctttaacccttttcagtctgacttctgtcaccatttattccaatgaaactagttgtgctaagattacctataactcccattcttcccagcaactttagagaaaatgttctttttaaaaaaatggaaactctgtgcttctagattctgcacaacacagtttcctctcctagtgttctttctgcctctcttttgttggaagaggaaatgttggggatcttacctgggctttctttttctcttctattgagaggcagtttggtgcagtgcctcaatctggaatcagactgagttgttatcatctggttattagcaatatgaccttgttttctcactgtaaaatggatagaaatagggttgttgggagaattcattaacataacacttgccatgcactcagcccatttctaacacatagtaggcatccagtacatgtctacttttattctctggtacattatcttcttaagtcatctcttgtttccaagatgacagctcacgtatatattgctccagtatgatctgtgcatctcagagtcagtttgtagagccatctgtatgttatatttgattttcttctgtctccttaatgtataccttccctaggcttctgcatataggaaatgacactgccatgcacctagatgattaaaccagttccggacactttgaccttatcatttgtgttaccatctcacatgataattgtgagttgtgctctccacatctgctttcaccagttgagttcaagacaccatcatttcttgcctggtctactctagtagcctcctaagtactttctgcactttgacttcttccctgttgaatccatatttcacagcaaccagagtgattttttaaataagaaagtcaaacagagcatgctttctcccagcttcaatgtttttctcatagtgcctagaataacttctgttctccttaatatggacttgaggtacctctacaacctcatttggtttccttctgctgctgtatactgtttggctacattgggattcttctaggctttggactttgtcaagctttttcttgattcagggcctttgcacatgcagtagaacacatcttctctcactctgcgtggctgattccattcagagctcatctgaaatgccactttctcacggcgactttcttttatttcctagtttaatcaagactctttggttcagtgcgtgctgaatttgcttaataaatgattccataaacatacatattttgaatagaatctgctgattaataggaatgatagttctgtgagatcatgctcattttaaatttagtcatagtgtcattggaaaccactacatgtcttttctattcatttaatgaattttcaaggtcataaaaatttctgatgatattataatttttgcatttgcaaatacactttgcatagtatttattgctggataaaatattggcccaaatcaggggttggagaactgacattcactgagcaccatatgtcacgttctcttaccttaatatcgtatgttaggccctgaaatctagttatccccgagtcactgaagaggagctgagattcagagattcccctaggctggccaaggccataccttgtggagggcacagcctaagtttagtccaggagtttgaactctaaggagagaactctttccatatctgctgccttatttcttctctaagcaaactccttaagttcacaaagttctttcatgtgtattactcataatatgtatgtcaagttctagagagtgcagggcatttttgacattttattttggatcaagctttcattcactaattttttatttttctgagcatccctttgaggtccttgaattcacggatgagaaaaattaaacaatcagtgattaagtggactctctgtgaagttacacaatggaatattaaattgttgatggatattttttattagccagagaaagaaaaaacgcagactttttttttttttttttttttgagacagggtctcactctgttgcctgggatggagtgcagtggtgtgatcacggctcactgaggcctcaatctcctggtctcaggtgatcctcccacctcaacctcccaactagctggaaccacaggagtgcaccaccacagctggctgatttttgtattattgtaaagacagggtttcagcatgttgcccaggctggtccgtaactcgtaggctcaagtgatctgcctgcctcggcctcccaaagtgttggaattacaggtgtgagctactgtgtctggcccaaagcattttttattccagtagttgtgtcagtctgttttctttctatgtatgtatgtataatttatgtatctatgtatctgcctgtctatctacctatctctggttaaatatgttttagaaaaaatgtaactagcacaactaggcctggacttatagatattatttatggtagaaggctaagttgtttatttttttaagttaattatttataaagaaaaatattaaccatatacaagtacatttagtacttagttatggcaaaaatcaagaaggtgaaatagatatggaaaatgtgattgggtgagttggttttattggactggtagggtgtgcccttggccaaaccaaaggccagagggtacaaggaagtcagggggacacactgctggggagatagagagggggctgcccagttgtgaggggaactaacttcttgtccagaacttccctagggccttccctggctcttgccttctttgctgtatattttggttactggcaggacactggttcaaatatacatttccgtggtttgattttataaagctaaaaaagcctcatgctaatattcagtctcttatgttatgaatgttaccattttacctcttagctatataggtatctataaaggacattttttaaaaatgaaaatcatccttcctcagtaaagaactagagaataaacatgtttctgaaagtagaatgatgtggactagagcaggggtcggcaaactttctctgagaggggccaaatggtaaatctttctggctttgtaaccacagactctctgttgcaaatactaaattctgctgttgtagcatgaagccagttatagacagcaaagaaaccaatgagcattactgtattttaataaaactttatttgcaaaacagacagtagttgtattttgcccaggggactgtagtttgtagacccctagatgaaagaaatgtatcttagggcctcccctcttagccctttccatcatcagcaatgtgatcttggacaatatactttaagtcttaatgaatttattcatttgaaaaactgacattttattttagatcaggcttttcattcactaattttttattgctctggacatcactttgaggtcctggaatttacagatgagaaaaattaaacaatgaatgaggacagttttcttgtatgagggatttttgttttcttcatatttttaatgtgtttaatatactggagtgagcatgtcttattcttgttaacagacaagctatctaaaaattaaaacacaaactaaaagtagaggaagattgttatgagaaacatgtcatgtatgtgaaatacattttataaggaatagattagattctttatggaaccaggatgggtataaatacatcactagataaatattaagtaggaagatcattatggacaaagattgtttcttaggaattttgcatcgtatagcactgtgttagacagagtccttaactgattatttttgtagcatttgtttacacattcacttattaattaattttgccaatgtattgagccatctatggagatgtgtggaggtctgtgttgaaagcttgagatagaaaaaatgagaaataaaatagttttggatctcgaggcactcacattgaaggagataaacatgtatataaaatattatcctattgtatgataagttctcaattagaagcatgtatgtatagggcaccactaggaaatctgtatcattggagtagagggaagctaggcaagagacctgcacagagtttgagcagttgggtcttgaaggatgagtagggattcttagacaaaagaagattgaaaggcagcttgagctgagggaaatgtctgtgcaattgtgaactttacaaatcataggtagttctgtaagattataactggagtcatgaagacaggtgaaggatgggatactcaaagtttggctagggccatgcaatgaaagccagggaatttgaacatattcagaaccatggaatgctttgggaatctaatgaaagatatgatacatttctataggaaaatcatcttacataaaaatttcaatattttgctacagttttaggaataaggatgtagtgatcactttatgaacagtacagactttttatatggttcccttctgaaaaaaaaaaggagttcacagatagacacatacttcatcatcctgcttgatggtggcagcaaatgctctggatgcacttatgtgaagtttatcatgactttattacttaagagcctgggagtatatgagattgtgccatactgttatttataatttcctcaaagagatggctaggcatgatcagagaagccttcttactggtagatgtccacatatgtcagttgcctaggcatgatcagagaagccttcttactggtagatgtccacatatgtcagttgcctaaatgctggagaagtcacgtggcttcggatagaatttcctcatttgtaagatggtgctcctcaaaggacctacctgccattagagtggtaaggattgaattaactcttctgatgacagcactgagccctaaatttagcacatactaagagctcaataaatgttagcagttaatacccttattagaattatgaaaagtcggtaatttcattcatgtatgttcatatatggagtgctcacaaatacttgaattcttttattgaacatgtgagttagtcttgcattacgcactgcatatatgtccatgtatttctggatcatcatgggtcatttgtttggaataaaacttcatttacggaaatcgtctgtacagccctggttaattttttctctgtgatgggttgcattacatattttctatataaaacagcaatggtgaagataagttaactaatgaatatatattattatgtgcttttattttacagcttctaatattcagtggggaaatttttcttgttaagagacaatggcaaggccagttggcctaaaattagatccagcagctgtgttttgaatcaaggccccacatgtgcactttatactccccaccccctgcgctgggcttgtctgcttctttttcttgcttcaggaggcagcatttttgggtgaatgttaacattcatgtttttcctagtacaaccagaaaggtgcttctgtttaattgtaaggcaggtttatttacatttacggaatggaaaaaaagatttatttaattattaattttacaaaaccaccctttagcaccaagcataaaactttggagcccaaatcaaggcactaggtcacttataatttgatttctaccaaaataagtttttttttttttaaagaaaaaaccctatgataatttttaacatttttgacagctacaagtaatttaagttgtgttttatcagtttatattcagaagccaatgttaactggtgttaattttataggtcctagtttctttgtatttcttgccctactgtttggttaataaaccttttttaaagaatatattcatgtacacacaacattatcatgattcggtttaagtatccgtgtttataagtgcacttcatttcacctaattatgttatttattcatttacacattagcaacgtactacatattccacttttacaggaacttattttaattatacctacagttctgttctgctccattatatcatagatcaagctgaataatagcagtcttaaaaggcatatgctaaaagtgattatgggtcattaaggccaaattaaggtaacatttctgatagccacaagcagaagtctaacttacaattacttttttttttttttttttgctttggggaacgtgttctagttggctttgatgttgacggtctcatggttgaatgcctagtgggtgtatggattgatccttgatcagactgatttttttttttttttttaggggggagatatatacaaaccatactttttatttatccagaaatctgtatttatccagaaatagtctattcaatgactttactgccatatttctcaaaatgtatgctttttctttagccctctctcttcctgcctgccattaagagtcacacaggcaaccaatctccccatctaggaaagtgagtactagaatgcattaaagtcacttttttattgatcattagcataaagcctcattgtgccattggagagtgacctaaataagtatatcacatcctttcaaagagaaatgccccatggaaaccatacctaaaaacgataacaataactaacagaatctgcgttttaatgagttgatttttaattcttgtttcgattggcccaatgtaatctattaagaaattaaagggcatctttcaagcttatccatatacttttataatcaggatgtgtgactctagtgttgttaattttatttttgagaaatacttagattttgtatgggcataagtaattcaaaattattttgttgattttatagacattttactagggagatccattgttgttacttattttctagtttcataattgctgattaaaattaataagattcaaatgggaaaatgacagtagaaatattccaatttagagttcttagtaggttggcttactttttgctggatttatgatgattttcctacatactcagatttggaagatacagcatcataaaataaactgtagtttatatggaacctctacattttggttggagatacaagtttctactggctcagaaattttttcttttagtttttgattttttttagagacagtctcaccctgttgccagactggagtacagtagtaggatcctagctcactgcagcctcgaactcctgggctcaagtgatcctcctaccgccgcctgctgagtatctgggaatacaggtgtatgccaccatgcccagctagtttttcatttttaaactttttgtagaaattgaatcaaactatgttgcccaggctggtctggaactcctggcctcaagtgatcctcccaccttggtctccccaagttctggcatttaaagaactcagcccagctcatgtaatttttaaatattcccactccatgtgattacttcagtctggacatgtcagactgaactgtcatttcagtttacatgtcaatttgtctttcatgtaaaaagggggaaaataggaatatatgcttatattttgttgtatctgcatttaaaaaaacacaagaaaccaaagtggttacctgagtaggggtggggaaggcagtaaagaatagtgtgatggggatgagacttccaaatagataactttttgtattattttgacccttgaaccatgtgaatgtattttctctaaatatatttagatttgtttttgaacaagaaaaaaattgatagcagctatgaacatttttttctttttttcattttcctccttgatataagttacattttaattgtcttttggattgttttcttcagaattttaatcataaaataaatgaaataaataaatgcaatcatcattccattcctatcagtaatttctattagtgtggctttttctgtgtttgtttttgtcatttagagatggcatctccctatattacccaggctggactccagctccagggctccagtgatcctcttgtgtcagcttcctgagtagctgagactacaggtgtacactactgctccctactttgtgtgtgtgtgtctgtgtctgtgtctgtgtgtctgtgtgtctgtgtgtttgcattagtttatgggcaactagaacacgttagatgcttttaagcatcgatttggataaagaagcagtattaaaaatccaactgatgccatacttcatggaagaaaatcattgcattaaacaggaattacacataccgatatgaattagttgatccaatggtcctttgaaatggaagttacatttttaggagatgggtatagcaaaagcagaggtgtttttggatgatgagcaataaatagggggttgttcctagattcccagagacttacataaagttgggaatgggagaagtaagtgatggggacaagctaaattttaaattactcttaaagtactttgtttagattatattaacctgtcaatgtgactaaaatgtcaacagaattctcttaagttttacagatttgtagatgctaaatgctcatgaactgaactgaataacagtaatgaggtatgatgatttggtaattttattttaattagcaacatgagtaactttaacctttatttaagaaaataaaggtaatatacacatgtgtatttattatacaatgggaaaagttccctttgaaattctccatgtggtttggtgtattggcttatgcctgtaattccagtactttgggaggccaaggcaggtggatagcttgagcccaggagtttgagaccagcctgggtgacatggtgaaaccccatctctattttaaaaagaaagaaagaaagaaattctcagtgcaacagtctttaaatcatgaaactgttcagttggagaatttgcatttgcttattgatagctgcatatctactattgtgaatttaatatcttatttatttacatttatgaatataatactattgagaaattaggctctattctttttacagtggcatttttactgattgatctagtctcatcaaatataactgagatgtggaagccattatcatagttcttaaacactattgctcttgagcaggggatgtgagatacagagcattgtggaaaaaaatgctattctggaaaaccactcactcctttgaaagtcaaagagaataaacaatgtggaatttgaaaaaaaaatcacactgaaagataaaggtatataagctcacttaactattaatgatacaaattaatctgcaaagaattaaaagcagctttgttaatggcagaagacacatgcagttaataaggacattacttctcatttggggttagattggcttctcctttattaatatctgtttaaactacaaatagaaagaactccattcttaccagacttcttgtcacaagacccagtctctaaagagaaatatcattgataggaaaccagaaagactaaatagatgtatttggtctcacaggcagtccattaatttgctcaaattaaatattatctttaaatattgaaaggttaaatgtacaccgataatggatttagacagctattaagctgtaattgctttctaatgcagttactaaaagacatttgatataacatattgagaaggaaggattagagacttctctacctcagttttaactgagagttttatggctttaattctggcagttgtaggaattggataacaacagtttttatgagaacgcacacaatatgcataaaatattcagtgggcagattgttgagggaatgcattatgtacagtgtatttatgttcatagtttttgcaaatctgtaccagcagtactatcagatcaactattcaccctaaatatttttctattagatctaaaagtcgtatttctgaaaatgttaccattttatggtttcgacccctctaagctgaattaatgtgttttgtgccctggatatatggttacagtagtgaccaaattaatttgaaaacttctcagtctgttggagagtcacatctagttcaggtagtcaaactgatggctttccctgcctgggtaggcagctttctttttagtattcgcattgtttgaatttgtagtatgagattttcacatttttacaggttgcattttgtgagttgagtgtctagctgtgacaaattattgttaacctaagaacatatgctgattgatacagtcagccacttgcctccagagttcaatggaaggacaaaaaatttttggaaaagaaatatgaatgagagctaggctcttcaaaacatattttcctggtgaattatttaaacataatctaagtatgagtatgggtcaggaaaaaaaattacctgcagttaagatatcaagccaaagtattttttgaattgaataaagaaagggaaggaaaaagcctgctgttgatccctgtcactcatgtttttgtattaataggcagcatctgctatttgttctattaatgttttatattaacattttcatttagtttcctttttaaaatggtgaagttacagaattcactttggtttcacaaacctttatggagaaataaatgcatatgaagatctgttctggggcctggggaagatgtttaaattccaggtgatgccagggccactgcatggcaccccctggggttgtacatgcacattgtatatggcagccgcttgcttccttcaaagaagagtgtgataatatctgtgctttctgttgaactttcagagtacttccacagatatgtttttaatacttttaaatcctcagaaataatttgattatttcagttttatacatgagaagtcatgttcagaggagtacacacgaatataaggcagaaaataaaaaatataagaatttcatggattacaaagaaataaaccactacttccattcactgtaaaccagagaagaatatatagggaagttagaattcagtgtgtacccttattaataaaactagtgttttattaataaactataataaactagtgtttattaataaattaaattttttcaaattttttctgctttctcaatagatgctctattttctcccctcctcctattccaccctaaaattaaaagagaaaatacatttctaaattttactgagatagttaagcacagaatggaatggcattacccataagagtctaatatataatgtttataatcctttaaaagtagaattagggttctgtcatctcaatatactatgctgactttgagatttcttttagtcattaaatctgttctgcaaatcttttttaaaaaaattatgagtgactttatgttttgttttagataattttatcactaccatctaactaatttttctttatgtattttcaaaaatttaataatgaatatgattgcaatatgctttgagaccaggatagatgcttgcttgtttttttcttttcctttagactatcatcttttacatacctttctctttctcttaaagtaagtggaaaaattggattcattgaattggtcttgatactatctagggttataacatcctaatattctgtgagtcttattttaggacttgcatatttaatacagtttttaagtctttgatctcctaaatatgcttatagcagccgctaccttcaccacacccaaatccttgaatgttatgatacatcatactactcatgctggatatttactgatctgctgtgttcaagacagactgctgagcttcgtaaactttaccacccaaactaaagacagagagtaaatacataaacacagggagttggggacttggctgaaaattgccacccaaagcttgaaatttatttgcatgctggaacaaagaatatccatgaacttgaaactcaggatgacgtatgtttgatgtttatcctgtatcattatgtattctagggcaccacttctgtatacccagatggaaatcccaattttaaagcaatgctcttgggtattgaggggtatatttgcgaagtcacagtcatcatttattccatgttcccttgccttcttttctgtcaagtactctgagagtcttgatgttgaggatttattggaagcaaacgttgttacctaaatgaagtctagtgaacaaaaccaccaaaagaggacatgaagtgactgctatgtatgtatatatgatatatttttcctcagaattatctaagtgctttggttggttgcaaatgtggaattttgctgtttgtctctaagtcactcttatagaaatgatctgtgtgtgtgataccataggatgtgcttccactgggctcctgagcagtgggaatatatacctgaaacagtatgtgacacttctgtgctttttctccctctgtggtttctgttcttcctataatgtacgcaagtgcaaatatgagcagtgagcgagtagagagaaaaccctgtaagttttgtgctctactttaggtgtatgtgattgcttctcttgctgtgccattcatttctgatttaaatgtctaatgactctcatcaaacaacatttaaactttctatgagatcctgtaaatgttcctttagatcatattatgagtaacaatggatgaaacgagctttaatggggaggctgcggttcagtccgggggttctgcagctgttggtgatggcagaacacgtcaattgaactgcagccatgcgttcagtggcattttgcccattaagcgatgtataaaaacagtattcctggtacagttacatttcatttctgcagcgttttcacagtcagcactggtgtgtcccgtggcctggccttttctcctcttggcgactgaaaaaataaaagcccagtgctttaaggtggtgttgcttaagcatgaatgaaatcactcaaaaaatgtcttcttagcattgaaaaaattggtcacaagtcagtaattaattcattttagagtaagttcatcttggggctgacaaagaggtgtagtagctaattttaaaagatgagtgtaacatctttcccatgtcatacatgtcaagattaaacttaaattatgtattatatattaatgaccttaattttattcataaactactgtaagtacaacagaaatcaatttagttctatttcagccatcatttctgggtgtgaacttctagtttctataaggaataaagagataggcatgaactagtacctgacctcatgaagcatacactgtagttggagacgtatagaccaaaagcaatcctagatggaatgggatatttgaatgagctaaatagaggattgctttgcacttagagaaccttcagtaaatgagtgttgaaagaaagtgtgttcaagagttacctttgaattttagatatttatatgtcactgtggacttcctgggagctgactgaaaatggtgattgtcattgtcatttgacattttttagtctaccagtctggggcctaattcagcattgaaaatagtttttcctgttttaccagaaaaagtagaagccaggagtttgtttttctctcttttccttgtgctcttttaaatcttatttccctcacagttgagcaggaggaggaaaaaaaaagtcctatttccttcatcttattttccactaggcttttgaggaggacgagatattctgaagcatatttgaaataaattgaggaccgtaacttggcaagtatgaggtgcaggaataatccatgtgcaggagagacggtgaaagattactcagaggtacagagccatggagagtcggaaggaacactggaagtttctcgtggagatggaaacctgagaacttgactgtggttaggacaggttggaggagtcctgggtggtgctgaagaggctcggttccggagtcaggccgttgaggttgaagcctggctctgccattcgctaacattgtgaccttggaaaagcttacctacctctctgagtctcagtttgctcatctgtaaaatggcaagagtgtccacttcatggatttgcgaggagtaaataagctagtccgtgtaaagtgatgcatacagaaagcaccagaagtattagctgtgattgattgcaggagccacagcatgcagcaggagaatgatttttgaggtgtttgaagaataatatgtaaagagggctgggtgatatgactcacgcctgtaatcccagcactttgggaggctgaggtgggcagatcacttgaggccaggagttggagaccagtctggataacatggcgaaaatgccatctctactaaaagtacaaaaattagccaggcttggtgctgggtgcctgtaatcccagctactcgggaggctgaggcaggagaattgcttgaacctgggagacggaggttgcagtgagccaagatcgcgccactgcactccagcctgggctacagagtgagacttcgtgtcatagaaaaaaaaaaagaataacatgaggatgtgtttggtgttggcattttggtcacattgaagcagggagggaatggacatttctttcagaaccatgcagccctaaacgttaaacagagaggtttttggggataagtgttaagattttgatgtggatattttagaaggttgggcgtaacagctgattcaacccttttttatcaccatcaatgaaaagggctacataaagatttaagaagaggaggacattcttttctccacagctggtcatgcgcccagtgtagttggcaggaaaacggattgtttggaatgtgtccctaaaatcctgtaatttaattttcattatttatataacgcagtccgtatatgtggcgctgtactacatgcacacaagaccaaatttctggccagtgtaattttaccaaagaagagactgtaactgaaatatttgtacctactaaattatctgcagcttggtaactcaccgttagggagtccatgtgatcccaatcagcaacagggattggaggaacgcattgttggcagtgaaataaggggtcaggaactagaataaatagtgctgggatggtaaacgggcccatgttatactaaatgtaatataaagtcactgactttgaggagtccagaaaaataagtttgtaaatattgacattaaagtagcaaccagtttgcatgctactatgtaaaaggaaactattaaaataattattatacgtagttttttgcttgcagcacttgtttcattctgttcacttttagaaacacaaattagaaaggagtgagtctcttgatgtgtgtctaagagaagttagagtaagatttctagaaatcacgagatatataacttggatagtttatagttttctacaagtgtttcatgttaaaagttcctacattaatggtccttcaatgaatagtatttacctctggaatccaggagatatatccacagttaccgtattggtcatgctaggcaagggcatgatttattggacttgatattatctgtatatagttcttgcttttcaaaacagtcatctggaccgggagtaagctaataaggccatgcactgcataatggcgtttcggtcagtggtggactgcatgtaccactttggtcccataagactataatggagctgaaaaattcctatctatatttcttatcattatttagagtgtactcattctacttccaggaaaaaaaaaaagttaactgtaaacagcctcaggcaggtccttcaggagggattccagaagaaggctttgttatcataggagatgacagcaccatgctgttgttgcccctgacagcgccatgctgttgttgtccagtgagacaaggtgtggaagactgatattgatgacccagaccctatgtaggcctagactaatgtatgcatttgcatctttgtttgtgacaagaagtttaaaaaatagtaaaaaaagcttataaaataaggatgtaaagaaaaatgttttgtgcagctatatagtatgttttgttttcagctaagtgttattacaaaagagtcaaaaagttttacaagagttaagaagcttataaggtaaaaaagttagagtaagctaaggtcaatttttttttttttattaaagcaagaaaaatcttttttctgtttttgagacagggtcactctgtcacccaggctggagtgcagtggtgcgatcttggcttactgcagcctccgcctcctgggctcaggtgatcttcctccctcagccttctgagtagctggaaccacaggtgcgtgccatcacgtgcagctaatttttgcattttttgtggtgacggggttttgccgtgttactcaagctggtcttagactcctgagctcaagtgatccacctgccttgacctcctaaagtgctgagattacaggtgtgaaccaccatgcctgtccaaagaaagaaaaataagaaaaaaaaaattcaatgtatccttaatgtacaatgttgataaagtctacggtagtgtacaagaatgtcctaggcctttgcattcactcaccattcactcatgactcacctaaagcaacttcttgtcctgcaagctccattcatggcaagtgccctatataggtgtacaatcttttatcttttatactatattttaaatgtacctttttgtatgtttggatatgctcagatacacaaataccattgtgatacccttgcctgtggctatttagtacaataacatgctgtgcaggtttgtagccttggagcaataggctatgccatatagcctaggtgtatagcaggctacaccatctaggtttgtgtaggtacactctataatgttctcacaatgacgaaatcacctaatgtatttctcagaatgtatccacatcagtaagtaacacataactaatttattgcaaggggcagaatgtaaaccattggtttagtagttttagattgagttaaaaaaaaaagatatccttgaggttagtgagaggaatcaaaatcaggggacagtgtaggcatttggggtcaaaatttattcagcatatgctagcatgccaccaggaaccagaaggaataaattattctgactccattcttggcaagatctgtgtggctacagaacgtaattattttgcaaatcatttaagttgctgaccacagctaggagattaccacctaagtgaagattaccacctagatggagtgtgattcctccctgggattccctttcagaattgtcagaaaacaaagcagtaaatccacatgttaatcattaaaataaacgaagtgcaatatgcccagcaaatcatttcacacattttctatttcaaggaattgggattcaaatcttaacctaaattttacatattcacattttaaagcatcactcagacttgttcagattactgagcggagtaagggtttcatctgaacacatagaagctggctgcgttcttgaaatggggaggatggggttggtgaggtcacaaaacttcttttcagctccctggttgcaaagaatatgagtgctatgacattagatgggaattcaagttctggtctaaattgataaaatagagttgttattttatggcctcatctttgtttttatatatcacagaatcactgcgaaaatggcagtttgttttctaaagaggcctgagaccagagcagcaggtcacaaagcgagcattttacagcgttgtcagtcagcctatttggctgaactgaatttcccagggcaaaagttttcttacaacgtttcaaacaattcatcaaaaagatggcctaggaagtattaaatgtcttacaatgtaaatatagacaaggctttattaggaaagtgtgcacctgtttatttattgacttatttattataatagcctttcaagtagttttcttgatccttacactcttcacacaatgagtgtaaatagacaccagtcatagttgtaggtggtgagctacagagctctgtattgattagatcttcaggctgtcaaaacaactagaaattttaataaatgttttcaaacaagtgaccagttccatctaacccatcagaatgttttattgtaaatataacatggctgtcagtttgacagaaattgtcttcccagaataatttatagtgtgatttcaaaatgcatccagtcacaggcttttaggaatcctgtcatagaatattattttatgccatcatgttttaaaaagacacagtgataacattgaataggaatagtgcaatgacactgaagtgcagttttagatgggaggggaagtcttccttgcttcagcaaatcaggtgtttgaagtttaaaaactgcttaagtggatttgtagtaaagctctgtctgttttaaagtactggtgactcaacagctgtggggaatctgtctggaatcggcgcggaactttggagaatgttttctcctcaggagctggaactcaactcttcctcagcccacacaatgcaggatctgtggttttctgtccctgtttctttttctccatttttctccccttcacttactctgattgatggaaacacgtgctgggagctttccctgacattctttccaaagactgaaagtaagaaatgttatggtggtgctatgtctatttttgaaagtaagtctgttaacgtaaagcctgtgttgatatattgggatgaattataatggtgatattattacagccttcaaagctgaaaatttattatttttctcacctacttttggttgctgatacttgatcataggaacatgctgtgcatctggttaattttggggaacccatttgtagattttcaaaagttaaactttatccttctttatatcttctccaggccctcttttgttattgaaaaacaaatagaaatacaatccactacaacttcggtgcttctgcttttctggtcactctcattattaatgcttataatgaagatatttttggaaacactgacttatcattggttttgcaaatacagtaaaaataatattgtttgttggaactcttcattatgattcttttacttttaaatatttaattcataattattcttgtttctacatctgtattttaatttttatttgtttttatttagttttaaagacagggtctctctctgttgcccaggctggagtgcagaggcatcatcatagctcactgcagcctgaaatttccaggttcaagccatcctcccacctcagcctcctgagtcgctgggactacaggcccgtgccaccaagactggctgatttaaaaaattttttttgtggagacgaggtctcactttgttacggaggctggtctcttactcctgggctcaaatcattctcctgcctcggcctcccaaagtgctgagatttacaggcatgagccactggaccctgcacttacgtctctattttcaaatgttaaatgtctttatgtataggaggtcatgttggattttaaaagtcaacagaaattgataggaagcagtgtgcagccctgaatgaaactcttaagttatgggggaaaaaaataccagaacctatgagtgaaattattttttaaaatctcgtcttgctggtagacaggttttttagagacagggaccgcatcttctttaatctttgctgtatcccttgttcccagcatattgtctggcacagagtatttaatacattaagtgggtgaataaaaaagtgaatggcgccgggcgtggtgtctcacgcctgtaatcccagcactttgggaggccgaggcaggcagattacctgaggtcaggagttcaagaccagcctggccaacatggcaaaaccctgtctctactgaaaaatacaaaaattagccaggtgtggtggtgggcacctgtaatcccagctacttgggaggctgaggtaggagaattgcttgaacccgggaggcagaggttgcagtgagctgagatcccgccactgcactccagcctgagtaacatggtgagacagtgtctcaaaaaaacaaaaacaaaacaaaacaaaaaaaaccccagaccaaacaataacaaccaaaacaagtgaatgggataacttggtgctgagtttaagagccaaggttcatttccttggtacctgttgcttgactagaagacaaatctgtcgtaaatgatcaaaaaaatgtttacatagacggatgtggaggagaattttatgtatgcatacacacagaatactaagtggcattttttatgtgacagattcatttccatgcatattccatattgtaagtcagtcttcacaactgttttgtgaagtagcagatccctgttttgcagatgaggcaactgatgcatacataggttaggttcacttttccaaagtcctagagtttttatttggctgagccaggatttgaatgtcagcactttagtctctttctagagtttctgtgtgcaatcactactgtctattacctctagcagtttatcacatgcacaattgttcgtaacacctggctgtgcatgatgtacatctacaggtagacacttcatgtacttgctgtggtagtactctagaaacactggtaagttcacatgttatcaaagaaactcctgtatccgctctccgagtgctgatctggtcattttctgcttgatgacgccagtcttttgagttaactcgtaggtgtgcatgttggtttctttaaagtgttagattatgaaccatagggcagcaggtgattaatttctgcatcataagaattcagctactgtttttaggaatttgcttacaaaccatcaagtttgcttattcttacagagttttgtctttatttgtggtattgtaatatataatagttagtatctgaccccaagagccttacaatgaggccacgaagacaaacagaatttcgagaagtcagaatgaagaatggtcctcaaaagagaaaggatagaatcttggggttttattcttgtgagggatgttagaaatgatcttatctctaagtaatggggagagaacttagcaaaatccttaaagagcaggggagtccactttagtgtgagttatttaacttctctgtgatttgtttacctttcttcaaaaatggaatgataatgatactcagccccctagtatgttgtgaggattgaatgagggaataaacatacatggagtacttaaaacagctcttgcacacaggaagtgcataacaaatattatcattgaaattatcattttacaattgaggaaattgaatcccagagaaattaaattacttactcaaggctaatccagctagctaatgactgagccagggctggaatcttgacatacatgtcgtcagcactcttgtaatattcaacagaattactgtaaagcaatcctctatttgacaagtaataatacataatctctgcatttacttgggatgctgaatatatactgaacttcttgctgttctttattttttcttctgggaactatatattgggtgattcttttaaaaaatgtggttatatgccaacattatgggaaaggaaaaaaaaacttaccagacttttcttccatacataatccaaatttcaaatgtattaattttgccgaatgccatggcaacatacatatctgtttttcagttcatgaaaggtattttgggaattattggctcatgcatgcttgagcgttttcgtctttcagctatagaaatacactatgtatcctcttcattttgtgtttgtgcttctattcaagatgagaataaaagcagttagtttctgggttgtaatattcttcagtgaacggtggctttctaaaacagttacaccttgactgaaatgaaaactctgctgtatcataaaagatattctaattactgcatctagttaaaaggagaataaatcactgggagattattttaagtgccttaaatataataaaaaagaataatggacgttgaacagcttgacaggtttgatgaatgcagactatggctgatttctgctgctttctaatggaaaaggagagcattttactttctaggtgtattgtcaaagcaaatttttgttagggaagataaggagaagccttatctttgttgagcacttgccttgtaccaggcattagccaaggcagtgtattatctcatttaatttcatttaatcctccccaaccttgtagataatgttatccccattttgcatctaagaaaaatgaggctcagagaatttgaataacttgcctcagggtatatagctgcaaagtaggatccagactaggttctttctctttatttcattaccccagtagggttgtgatgatgatgtaaatataaatgtaaatataattgtctccactgttacaaagatactaatttcatcccatttaatttagaatggttgtgtccaaacaattttaacttctttgagcctctgtaaaatgggaacagtcaggtcactgtgatctaaaaggagaatatatgtgcaaacctctttgcttagtgcttgacagtaaatggggagtgcctgggagatttgttttccatatcatcaacagacaaatgggtgttcccaactgattctaagttaagagttttagatgtttaattaatagactcataaattgtgcctgtaaatttaaaacggtatctgttgagtttttctaaatgtattttacagattagatggtgatagactttcttaaaatgttgtgttttccattggattttgccttcataaatgtatgaaaatatatttagttagtgtggacatgattgcagtgctaatacatggcagattgtgtgtacatatatgtgtgtgtgtgttggctattgttctatctgtaggagggtaaaaatctaaatggtgggcaaataaaatcagaagaaaatgttggttaatttttggattatgttgtctctataagagaatgttattactggtaagtattttgcaaagtttttcatccatgtagtgaatatgaaacatgtcttcttggttgactcatttgtatcttttacagtacattttgggtgccagtttatagattcttttcctaaaatctgcaaagtaatagaagagttagaattcagtacctaagatacagagattctattactccaacccccttgccatatgaagatctgtgtttaaatgagtcaagaaaattaacttttaagattctatgtggatgtatgaatttattcatattccaacattcagttgatggcatttatgggaactatactcatggaaactcagaaacaaagaaacttttatttgccactatattcacacactttagtagttctttcctaaatctcttttgaagtaaagaatactataacatcatatagttttgtgttcacagttttacacctaattttacacattcacatttatagatatgcacaattactggacttactctttgcttgtgttcaaatataaaagcttatagaatcttgtaccagctatcaacacattcatccaaatgtattccgggtttctccattgctgctgtggtagtaaatataaatctacattctcagtggtattagttgttcttagtcaagcatgagaggaactgtatatgagtgtcattatctaataatttttctaactgtgttaaataacgtcgtattctcccttcctttgccatgctgaatcagctgaagagacaaataagtacagaagggatgagtgtggcttcataatcagggatgaatgtgttatgatccatcttgatccaataagcagatgaatatttcacaactgcattattttgtaagtgaggatactgtcagttttgtagcaaaggttctggtagataagattgtctttcttgatcttttataagtaaatttttattgtaaattatttaactgcattctctgaaaaatgtacttttgtatcagagaaatatgcttaggatatatatgtgtaagaatttaaaggacaggtttagttatgggccaaaatctaatgttgtagcatcaacatgatttttattaagaaaagagaatttgatgttgagagttttcagttcacatacagaataagtaaaccttatcctataaactacacttattattggtatccgtgtttttaaatgttttatgtgtacctcatcaaaatgagatcatgatctcctaatttatagtgattgtgattatttaaaactagctgaactaggataacataaatagtgtaaaaagggaatcctacaattgtgattactacattaaaaatgcaatttgcagtataaaatgccatgtgaaggttaaatgatgttaaagataataatgtgtataatgaaatcaagaatagagcatttaacaggaatgtatcactttatgggcatagaaggcaagagagatctttacactgtcattattacgtacatggtagtattttctaattcagtggtcttcaaattgtatactatggaactcactatatgaaagagataatttttttacatgggcacaaacacacaattaccttagcaatggctgaagtcttattcttaaaatatattctttgttttgttgtatatttttctctaaaataaaataatttgaacaaaataaatataggactatccttttcaaagtaatagtcagcgattgaatttttgaagtggaaagactgaatgaaggcctgtggataaagacgaaatcctgaaatatcaaaaaacaatagtttattcacaaaatagatgtttgtgaaataaaagttatgccctttgctttctcaattgtgtgatatttatatgtcttagtgttaatgcttgtggagtagggacttaatatttgttaactgaataaaactgcctaattctatgaagaatactaagtttatatgccaggaatttctcttattttttgcaaatatgtaataataatgttttttataactcctcagatattatgatttactcttgattaggcaaactgtgggaggagtatcagattatacaacatgccaaaaaacattaattatatttctctgtaatgaagacctgcaaataagtaaagatgtttgtaagcagtcaaagtagatgtcatcaagttcatgtgttaaatttgttttgggcagatagtgaacagtcatttactctattagacaaaatatcataattagtgaaaacaatattctgttttttttgttttgagatattccctttgttttgggggttctgcagatttcctgtgatatgtctgcatctgattttgtttatttagtctgcttcttcaatgtgctgacttcataccttgcaaaaattctgaaatcttctcaactagtatttgtgtattgcctcttccttactcctcctctgtttttttaatgaaactcctctaagaaggttttggacaattctcattctatattatgtctatttatgtctatttaatatagtctacttttttttttgcatctctgtttcattcactagaatataagctctctgaggaccatagtctgttttgttcaataacgtatattgagcatttgaaagagtgactcagaatggatgtccggtgcgcaagtggaagcattttttgaataaatgaacgatttctgtgtaatttattctgatctgtttttcactttacctagctttcattggtctcgtgtattgtataattcaagctctgtttcaatggctgtatttttaatttattggtgttctatttgattcccattcaaacttatcttttcattatgatgtacattatttttgtctgtattaacactttaaatatgatcatttaaaaaatctctttcaaattactctatttgtcaagatcttgggggcactaatcctcctttgtgtgtctactgacttgtccacagtggataagtttgtgtgtgtttctaatttttgattgtgagctcatcttcatctgggatgtttgtctcctttggaagtttgtgctctgggttatgggacagttcttacaaagtggttttctgttagtttctgccaatttctcaggaatttcattggtttggcattagtttttacattaattttatggcttgtggttcccaaactaagcaaatagtataaatttagattctgcaactgcatatggaaaagttttcagggttggattactcataggcaactctttctttgcccaccaaagcccttgccagacatgttttctggccatttccctgaatcagtgacataagaatcagtagcctttccaaatctctggctttgtgcaggggtcttaggacctgtgcctctgtgggtttaaaaactccagcccctatcccttagggcccatagatctgctaatgtttccagttctgtgttttttgttctggctgtaaattccctctcagaattccatttcttttgagtttgggtatgtatttaacttttttctcatcatgttttatccaggctttttttttttaaatggagtgtgtgtgcgcgcacgtgtgtgagagtgtgtttggaggagtgtattatttgaaccatcatattgctgagactagaaatcccctctcatttctaagatcaattattatgtggatatttgctttctttttctgagtgtaatattaaatacgaaatggactcgtgaacctggagaatgtctgtcagaaataccgaaccttccttctttcattttcgcctgtaaaatcttacaatttttttaaagatagatatacagccatctagagaatacacagaagagtgatttggtgttcatctttgtgtttgctgtttgctgaaggatcactcgctaagatacgtctaacattgctataattgttctgtttccctttgaattgaatatttagggtaaggcactgatatgtcagtaggatgaccaacactaaaagtccagtatcctgggaaacctctgtctttggtagacctggattgtcaccttagtcttggattccttccggagactgaagaaatcctttaaaaactttcctgctgtggagtcttctggctcaggccccaactacagtgttacattcagacttctttgttagaacaaagttttacatatattcaaatagtaaggataaatattaatctgtttagaaagagagccttgaaaggatcctagtctttttgcataggaaaaatgtccccaatcaatgagaaagtctaggagcatgatcaagacttattttatatagtttgtcttttagggggtactggtggattatacttttagagttacattcagtattattgtggctggactaaaaacccctcaagaatacatttcacattgattttattatagacatctgtcaagcaaagcagaggcaaatgatagcatactcatttaccagtaatgcaaatcaaatgagctagtggcaacaaaatcactcctgacacctttgccctttttctcttgatttgaactaatgacgtgtgtgtgtgtgtgtgtgtgtgtgtgtgtgtgtgtgtgtgcgcgcgcgcagactagcaaaatccagactagcaaacaaaggccaatgacaggataactttcataccttcatgcctgggtcactcaccatgtacgataggagcagtgcattctcttgtgaattaaaaatctatttatccttcctgggtgcataagtcccatagaaggctgggaggggaagtggaactctttatataggaggggcttagacctcaatagcctgtccctttgaatgacaaaatgcccaccagccttgccacaaatagcttctgaaatatgagaaccttttttaattcttaagatccttgaccactgcaactaatgtaaagacacactccgcaacaaacttatacacacacacgtacacacacattttattctgttttataggaatggcagtctttagcagtgcataatttttttattattattttgtttgagactgggtctcactctcactcaggctggagtgcagtggcatgatcatggctcactgcagccttgaccccctcctgggctcaagtgatcctcccacttcagcgttttgagtagttgggatcacaggcacgtgccaccacgccttggtagtttttgtgttttttgtagagatggtgtttcgccatgttgcccaggctgttcttgaactcctgagctcaagcaatctgcccaccttggtctgggattacaggcgtgagccactgtgcccggccaacattccatcattttaaaagctgggcaaaaagggaaggaactagttgagaaaggaaggttctatggccagaacatcagaatgcttgtttttagtttttgcaaacattggtgaaataatagttggcttttttgtaaagcctttccagttggaaactgcaagtactttttttttttttttttttccgagacggagtctcgctctgttgcccaggctggagtgcagtggtgtgatctttgctcactgccagctctgcctcccaggttcatgccattctcctgcctcagcctctccagtagctgggactacaggcgcccgccaccacacccggctaattttctgtatttttagtagagatggggtttcaccatgttagccaggatgttctcgatctcctgacctcgtgatctgccctcctcggcctcccaaagtgctgggattacaggcgtgagccaccacacccggccagaaactggaagtacttttaaaagtatgatggaagatacatactttgtaatatacatacatacaaaatttgttctttgagcaaatttattcagttttactggcaatgaaactcataatgtttactcctcagaaattttaaaacatttgtttgttgaatgtatttattgtttctatcggcagtctttggaaatctgtcttgtgatagttctaataatatggtttgaatacagcattgtcatatgtcttatatgttggggcaacattctaataactatacattttttatcttccgatacgtttttctgaataactctttgtgttgactgcaagtatgtttttgcagagtcaccaagttctgaaagtatgcttttaggatggcactaggttactgtgtttgtattaagtataattgtgttcttttgtagatttgttcctatagagctatggtttcatggtctgaagctgaaagaggtttaaagaggtcatcacagttcctcctcccacccttactgttgttaaatatgaatgtacgtttgactattggaggaattttgtttctagaactttcaagagtaattgttttctgtaatttatagtaggaaaatattgatttattaatagttaaaatgttctttgggatgcttgaagaccatgatgtgaaaaacttaaaaaaattagcattgatgttgtttctatatatttgccaatgggagtactataactttgaaatgtaggggattgtttgaaacatgaattgtgaaaaataacgcaactttagttattttatattgggtccaggctagtccgctgaagagtatgaagtacagttttatgtaaaatatatctcagattgagaatgtggaaacactgttctttaaaaaaataaaatcttcagtaagatccttttatgaatttactggtttgttctcatttgtcatcggactgtttccagatgtaaaatattactttcttgaaattgctgttgagtctactatcaagaccaggtgcatgttgttttacagctattttacttctgatttttaatgctgaaactcatagaatgccttgaactgataatttgtttaactctctacctactaattggaccaagaaataactttgtatctttatctcttttccatttcatgttttatttctgtttcaattagtgtgtgcctttggcaaaaaggagatgattttgctttctgttttaggatttgcctccaagaaaaaatatattttattgccacattttctcaattgatccagtagagttcacagacaatgaaaagagtaagaaaactaatttttaaagcttggtagtgttataattttcttccttataataatcagaaaaagaatttgtataacttttgtttctaatatagcagttctgaaaatctaggcttacacattttccttcccattactgctgtttatacttaagtaaaacaaaaatggtcgctgcaggtttttttctcattttagtgcagagtttgaattcttcaaagactgctaaggttttcccaccttaacaatttatgacagacccttatatcttcataggctgagtccgctgctaagagtttgctaactcatgactttaatacaccagtagagatcacactggagttaaaacaaagagagcacgaaccctgaaatgatttaagactgttcttagctgactactggaacacagtgtctcacgtggtgttattggtaaccttaatgcagattataattctgtagtttaaccaggatgtgttggctatggtaaagtgcctttataaggaattgtgaaagggcacaaggaatggaaacagaacctcagttttctcagtgtaaatgatgatgacaagaattccctgtgcacatttgttgttgtgagaaagggtgagatagaatagattggacacatagtaggtgctcactgttagtttttctcattcattcattactgtgtcattctattggcatgctcacagtcatgtagtggaatatgaagttacatcgtgatatttttcattcattcaccactgtgtcattctgttgacatgttcacaggcatgtagtggaatataaagttacatcatgatattttaaaagctaccgatgtggtagatttcacagtcttgaaaaggggttttttttaagctgaattttcagtttcacttgagaagagtcctgatttgcttgtacaaagagcagtagggttgcagagaaggaaagaaggcaactcttttaagtcccagccgctactctgctgtgtcttattctctaaaacagtgaagaagtctgggtggacattctagtggtcagaagcctaagctttgtcttttgatgagtgcagacaggggagggagcaactgacgagggagtagaggggcttggagccccttcccaagtctaccatccctcacttatgtgtctcttcctcagtaaagcacccccagtgcccttatttgctgtatttttcttcatggaacttactgtctatgggacctatttgtgcattcatttatggtgtgtctctgcattgctttccctttcactacccatgtaagttccatgaaggcccagtcttaagcattacaggttgagcgtccctaatctgaaatgctccaaattccaaaacctttgaacactgacatgagatagtgacacctttgctttttctgttgttccaaagtacgcaaactgttttatgcacaaaattatcaaaaatattttgtaaaattacctttagcccatgtgtgtaaggtatacatgaagctgcatatgaaacataaaatacatttcatgttgaaacttggttctcaccccaaagttgcctcatgtatatgcaaatattcaaaaatcccaaaaaattagacatccaaaacacttctgatcctaagcctttgagataagggatacttaacctgtactgggtcctcagtgcctggcacagggtggatgctcagtaagtattttcttaaaagaaagaacaagggaaaggtagatgagacgataagaggtggaggtacagggaagaagaacacagaaacatggtgatgaaaagaacagtctgataccttatttgggccccagaaaatgattggtactgaagggattttattagtggtcatttaagaaacttgtgttgtactgtttttgtgtattggaaggaggctagacattgttacatggaaattcacagttacattttcactaaatgtttcattgtgaaaaacgtcaagaaaggttggagaaggtctaggaaaacttatctttgaagatactgtcttatgaatttccagctcagacttgcagcttttgggagctgaggctatgaggtgatcttgagagcagctgaggaggctctaatgggttccagctgtgtgcccagagaacccaccctctcaggataacattaaccaggtagaccctgccctgactgacttcctctgggctttatgggtccccgtggtctgttgcattgatcttgcattttcaggttttatagcaattctaaacatgtgagggtacatatttgctctttgatgtgccctttgatagaagccagagtgctttacctgagcctgcctgtaataatgggggaaggtgggttgcatgccctgcagccatacgctccctgggaggctggttttattgcggttgttgattggcagactttaatcaggggtgtttcttgttgtatttttgaacatgaagtatattaaggatagttaaacatgtagtcctgctggtgttttgttttgttttgaaccacattttgttccattgtgccacttgatagaaaggagggcagaatggaaacatatggggagcagaaatagtaacacttatgtcatataactacactgtgttggtgattttttgtttttttccatgttttataatacctttatgtacatccctattaagaaggcagctattgtgtctccatttcacagagaggtaagttaaggaatgtggaatttggaaacatgcttgccggttagtgtggatggaacctaaattagaattcagagctcttattactagataggagaccaatcccaggcagtcatggcatttctgtgaactctttcgaagagtaaagggacaggaattgccttttcagagtagaactcagtgcatatcagtggaattatagaactttagggttagaagggcctttgatgggaccatcctttaagctagaactgcctcttgaagtttgcagtgtgcatgacctgcagctccattgtttatattccaaatctatgaaactagtgagagaataggacacatctttgtatgtttaggtttgacagtacttatcagaagtggtcatattacggttttctatcttcctttggtggcttttcagctttccttggtaccagccttccaaaagaaattagctcccttgtgccctcactttaatttggaagagattggtttggaagagccaccaagggcccactagacagctccttagaagttgctgtgacttggcagatggcacctgaggtttaaggattggggatctagccatggcgtgttgatgatgatgatgatgaggatggcaatgactattaactccttaatccatatttaatcatatcaccagaactgatggttgttcattgaagattcacttcatgaagtacaagctaggtgattcctttttgaaaataacactgtgggcctaagatatatggaccttatgtggcttaaaatgacccacttctctgtgcttactcctaattaccttcttatttctttgaatttagtaatgggagtaaatccgactttaaagccatttgtggtggcaaaccctaactattcaatgaaatacaaatttggtacatttgcatcctatgcaagttttatatttttgacagctatttttgtatttaagcaagaagccgaaataaaaatttctaaacagatatgccagattatattcaccatgtttgagtatagtattgattggtcatggctgatgtttatcagactaagcaaagtgtgtctgtattagttgtctcaagagggtctttattcttaaatgcttatgaattccataataagtcttggaaagtggaacatacccaagcacaatttataacttttctaggctttattggtattctgagccatccagtgaggactggagtcattcacatgatagaataacacagataccatttattaatctgctgaatattgatcacatttagcaaattgctgaatattagtagtgaaatactattcctctacaaaatagtagtagccatagtagtagcaaaattatcctcatgtgtccatgcatgatttatatgtatgtgtgtgtttatatatatacagtgtatacatccatatctctatatttctattttgctatctttgttgggatttataaggtaacttttaattattttccttcccccattctctacttagcgatcctttctttataccaatcatcatggtaaacactgggaatataaagattaataagtcacagtacctatccttagagctggaagcaaatactttttatccagcataatgagtgttacgagagatggtatagaaaatgctctggtaggcctggtgtggtggctcatgactgtaatcccagcagtttgggaggctgaggcaggtggatcacttgaggtcaggagttggagaccagcctcgccaacatggtgaaaccccatctctactaaaaatacaaaaaaattagctgggtgtggtggtgggcacctgtactcccagctactcgagaggctgaggcaggagaatcgcttgaacccgggaggcggaagttgcactgagccgagattacaccactgcactcccgcctggatgacagaacaagactccgtctcaattaaaaaaaaaaaatgcaaaaagaaaatgctctggtatcccagaaaatgcctactctgtttcaggaatgcaattcagaaaggtgtaccagagtgtcatttgcagtctagtggtagtttcatagaatgtctgtttcaagaggacccttctctatagatctgtagtttttattagttataatttcttcacacttctgtcagaaatgtttgctgttaattttgaacactgtttttcatgtgaatatattttttaagtggatatctttttcattttgtttttttcctcctggcttttaaatatatatttaaaatatttttatccatatctaatttttgcaactttcaaaaaaactttctaagcagtcacctcctgaccctctttttcccccttagctgtttcccccccccttttcagggccacctcccctccttcagagcccccgcataatgctattcctttaccgtccagccatctgcctgttttagcctcttcttcactctctctgtttcttctatatagatttccccatatgtctgcttcttcctttatccacaagtccagacactcctccatagctttcttaccaccccatcctggtgtcccgtctgttcataaataactctttcatccgccttgaatcccaaccccctactctttctaaaaagagtgtgcaaataaacctaaagtgcacggagccaagatgcatagcatagttttgattcagaatagactttctccttccaatcacctgttttagtccccattttttgttgcttggcttctttgtacagatccacaattgccgttcaatttttgtatgaaagtggatgcaaagttatttaatgtcttcatgacaaagtttttgcctcttactggcaggttattttgccctaatcagttacacagtcttgtgcagcctagtggttgctattttggagtagtcaggtttgaaccttttgttcttcagaaattaacgtattatctcagaaacagcagtctctgcttgcgtgcttggcaacacaaaactgcgttaggtccttttctaagtctgagttctaggacatgtgccatgaaaggagtgttaactgaatcacctgcagaaatggccacaaggagggctttgtaatgttctagatatttaaaatgttggtgtcctcctcctagcatggtgtgctagtgacaggctcctttctccctggtcaagagtaaacattggcaatttacttccctttagaaatgtgttactgtagccatcgcggagttgccagtgtttttccttcctaatgtcagtgataattttactcacagattccctgcagagattttagctcagcaggaagtaaatctaggtaagattgccttgaaaactgatctaaaacaataaatgctaactgtatcattcctttttatttaaaaaaaattggaggcataactaacttgattatttgtaactggtgagatctaataatcgtggttaagaccccattcgttcatacattctctcgttctctctctcactgcttctttgcctatagaaaaataaaagtcagagattgaaatgattcacactatattttttaaggatgaaatatcatagtagaaatgaaaggtagaactgtttactcatgagatgctgagaaaatctaaactgtagctttcctagagtttaggaagctaaatattttattggtatcaaaatcagaaatatctaaagaataagatatttagttttaaatgtttcatactttctaaaaagagtttttgctttgttttgttttgtttttgttttttgagacgagtctggctgttaccacccgggctgaagtgcaatggcacgatcttggctcactgcaacctccacctcctgggttctagtaattctcctgcttcgacctcctgagtagctgagattacaggcacctgccaccatgcccggctaatttttgtatatttagtggagatggggtttcaccatattggccaggctggtcttgaagtactgacctcaggtgacccacgcaccttggcctcccgaagtactgggattataggcatgagccactgtgtccagccaaggtcttttgttgttgttgttgttgatagtcaagaatgagattttactgaaacaaggacatcagaataaaaagaaatgtaaaaaatgggaaagacactgaaaattacaacaacccatattactcattcagattctttttggaatttcaaatagtcaataatgaagagacataaattccttggagaaacgtagcttagggtcagctttcctttaatgacactagtgctatagtcacttatatgtagtatttttggtgttgtccaatttctgtggattctgaacattagctgtacacagatccaagtctgtggctttagcatatttttgcttttacatcttgtcaaaaatatactgttagaatatcttagactcgagaagattttagaaatcactaataatgtaacaactgttattggttatgaatgaacaaaggttcagttaaagagtatttccaggtaaggctgtacatatccacagtatattatagagacttctgggttatgcactggatattaatggtttggattatggtgatgtttctgaatgtgtgaagggtgaagttctagacttcatttttattaaatgaaattgattttcttacccccaccaaattacttaccaaacattagatacctaagatcttaaacatagccatcctctaaattatttgttctttaagtgtccagagaatatcgtgcagcttccagatcatggagaaaccagttctgtgctcttgaagttgcagtggtaggagaaatagcagtcttctatgacagatttttcaactttaaccctctcactctctgctaattagaatcatacggtcatacacttttggttttttttgtgtgtaacaaattttttctaaagattcaacaaaagagtttcaaggttaccttcaagtaggtacaaatatcttagctctggcttctttttctcccaaattggctgtggactgtaggagcttaattagttcaggctcagtgcaattggtttgctcctagggtgtgtctatacttaaaacatttttttataacagaaaatacgtttttgaccacttttcataacttcctcttgttgtttaccagttttaattttatcttggcaattgaaaatcttgggggaggccaatctaaaaaaaattcttggattttcaagttggatatacatcggtttcctaaaaagaactctctttttcaataactttgatatctcattcattcagcctgtatttattgagagcttatcatgcacgtggtgttatgctttttaattgctggtaccttgaatatttagagaaaaaatacctcgtgcattttgtctctgtgtgtttgacatgtcaccttgttgaatctgcaccaagaaaatgatgaattccaatgatctatggtagttacaaggccttagaagaaccagggatgtgaatttttggtctgcttcctccgtatttcctattcattgagaaacgtgcttgtatgcatataaacaattccttactatttttctttctggagaggaaacagtaatgggtggattttatcacaggacaaagactcttccagatagctgttacagtccctccctctgctcacctgatttagatgaacctctctttgacccaccacgatggtggtaagtctgccgttgcagttttgtagacatgtatgtgaaggcgatgtttgttatggggtcagtgttgccttaaggatgcgggctagagtgaggggacctttgtggtgggctttgcagacttcttggcagagggaagcacagatgcgtgaggttactattttcacctatctcctcctttctttattgtttacaggaacacttgtctaagtggtgcacaattttgccttgcttacgcttctagagtgaaaaatatctgtccagactccctgggataggttggttctaacatcttggtggattgagcctggaccaggagttttgacttagaattcatggagagaggtgtctgtaaatgtatatatacccctttatgtttgggagaaagcatctgtggagcttatctgggtagcaagaggattttgtgacccagcaaaggttaaggcacactgcctggaaaaatcaattaggatccagttgagggttagatctggccatagactttgcctggtgttggtaaataatctgaaagccttaaagcatctcagagtaatgaaaggggcccaagggttcacagtgccttttctcaggattgctgcaaggattctggattaaaaatccttctgctgtctgtggaacagaacatttcctgggatcaatccttgagccttccatagacaaagaatttcccaaaactaatcttgccccatgtggtgtcagaggtaaaataagtgccaagcatgagaagccagagtaacctttactggagtaacctctgctagatctcttgttatctatgtactcttagaatatcttagactcgagaagatgttagaaatcaccaataatgtaagaactgttattggttatgaatgaacaaaggttcaattaaagagtatttccagataaggctatacatatccatagtatattatagagacctctgggttatgcactggatattaatggtttggattatggtgatgtttctgaatgtgtgaagggtgaagttctaaaccctttttagataggcaagtgtgatgtgagcagtagagtacattttttgtttttgtttcctgaagtggggcacatttctctcccctttgtggttctgtaaatacattgttgagtccagtggaacttcaaagatggcacatagctactgatgacacacacaaatattgtaagttgataaggatgtctgaaatgttataagtggctacctgatgcctgatgtcaatgctggtatctgtaaagcacacacactaagaatagagactggcagctcaagggtgttgatggtaattttattgtatcttcaagaaagtgtgtttccagagaattattatcagtaataatgactaccaccttgttttcttttgcctcatttctctttcttcttccatgaaactggggtaagccttattgtagagagaagcccacatggatatccagcacctaggttccgccgagggcaaggcggaaatgaactgagttattccatttctgtgtaaatcggcgtcatttgctacatgtgcaagttttgggccagaggtgtggaaattgggttcactgttaatctaactagtgatagcctttttaatcatgtattttaataggaaggtagcacagttgagggacctcttttgcctcttgtgcctaagacagctgggtttgaaactcagtttttaatgaattatttaactttactgtgtctcattttcaaatctataaaatggggttaattgtattttgcaggattatactggagaagatgatagtacatttcagatttctaccacaaatatggccctcgaatttacttttctctactactaagcaacaaaataaaattgaggaaatgggagtctctctacctggtctttgatttagagtgtggtatttcttcattatgggtagaagagtatttttctttatagagagtcattaaccttcaggaaaaaaaaatcaatcaaaggttacgtggaatgaagaagcgatgtcatgtaattgagatttttttttttttgattcaaaatgtaaactcacttgatttagaattgattggaacatggcatgtgaaaaaaacacaggagacatttaaaactgtacctaaatctgatatagtagttaagaaagctagctttataggaaattaaagggggctgattagagtaagataggagagagagggggaaaggggatatggtgggtagctagaagaaaggcatacacatgcttagaagtaggaagccagagatggaggaagacctaggatgggcttggaaaacttctgaagccttaatgaactgatcttgtcacacacagctgttcatttgagttgtgggcctcagagtattattcctttttatcactgtcttttgaaatgctaattagataattgaccattgttcccagttctttggttactttttattcttaaacttctagagactaggccttgaatgggatactcagagcagcacaccagatgggaaattattctctggccttcagttgccaaatgaccaccacagtagtgcttgggatgtataaaatccagctgagaggcagaactagcctaaggggtggttagcatacttcttgggatagtccttcatcaatagatttttattttgtaatgatgaaggggactgcctttgtatttttatacagatttatcagatttacttaatcaataacttaatcaatattgattacttaatcaataatcatggtcttcttgaccatgaaaggctcatttaaagaaaagaacacttgaagaatatctgaaaatgattagcaagatacctttggtttttcatgaaacaccattataagtctaatgtttgaagaatgtttttattctacttctgacctagttaactcatagttttttttttaaattgaattagataatgtgtatgaaagcatcttgaagaatatacactcagcacaaatgtaagatttgattaataaggtggttattaatgaataccatatagtaacaatatatctgagtcttgcagaaaaacattcttgaccaacaggacgtgatctagtagaagagctgcctgttctacatattttataaagagaactaatcatttttcttctgtatactcaatccgatatcaggaaacctcatttaggtctattcacactgtagaggcagcaaaataacatgcctgaccttttctatgtaaatattaaaaattattaaatctgcatgttggaaagattgatttcggcaataccttctaaattttcagtgaatatttaagtgtaagtttgcagatagtttcatgaaaataattgacttttagttttggtactagaacaattggaatattggtggtatttttcattttaaatctgtgtgaactaaaattttcttatttgtctggcatgaacatcacagaaaaatcctttcccttcaagctatttttttaaaaaaattgtaaaggagatactatgtattgcagaacatttagcaaatagtgaaaaaataaaaagggaaagtcaaaaattccctcttattagttcagtactgtaacagtcgattgtattgcctgggctatttttttaaaaaaattgtaaaagagatactatgtattgcagaacatttagcaaatagtgaaaaaataaaaagggaaagtcaaaaattccctcttattagttaagtactgtaacagttgattgtattgcctggtggtagtctttatatctgtacacatatacatacaatttaaaatatgtatgcaattttagattatttaaataaattcatacttattgttatatatttttctttttctttttttgtatttgcatttttaaaaaactgataagacctgccagggttatgtgtgctgtagtgtttcctgaatttatttaactactatggtttttctgttttctaatttattaattcattaaacatttgttattcctttgttttcttgggtcagttttatagaagtcattttccttaaattgactgttgagttaaattatttcactcttatgttccagatcatgaatttgtattgtgtaaaaatttggctgcattccataagttttgttgataatgtaatattctctgtgttactagtttctgaagttattttggcagttttttccttttaatacaatagctaacttgaactctcatttaaatttcaaagagattatcaagtttagcttttaaaattttcataactgttttctagttttattaaagtgtggccagtaaagaaacagtgtattttctgtgtcttaaaatttcttatactcttagtgtcccaacaaatgatattttaggaatttctcagtatttcagatgagatttatttttatatttgtaatagttggaaatgtggcttattttctgtagtgtacattttaatttgcttttcagtttttaaagttttttcttaactagatctcttttgaacctagaaagatgtgttaaacactcccacaaaataatacatgtttctcatgcataagcgattcatgatgactgtgtgtttatggtagatattttcatctttgatcttcagtactccctcttttattattatctctttttttccatgtattattgtaagagaacttttcaagtttgtcgtctacatcagtgacaatttttctacaattttatgcaaattttaattttgttaatgcatttttagttttcttacaatatttcctattacatccatctgcttttacatctcttcacaaatcttttgtgttgacacctattttatagaaatattctattttatataactgtcaaatgtgatgttttctagactccacttgtattttttatagggtgaaaatgtttttcaaagtataatttccctctgaattatgagtacatatttccctatattttattgtgcagatttttttctcactacacagtttttaacatgttaaactttaggacgctgcaaatctgcctttcttaatatattctgtgatgttgaggctaactacatatattttgtaaagaggtatgctggtctccatgtcagcctctaccaataggaggcgctggagggagagtagaaggctagaggaggaagaacttggcctttcctgttcttgttatcatcactctggtaacatcagtcttttccagtttttagttttgtctacattcctaaaattaacctccttggagataacagccccagtctgctggtgtctcttcctcatcacgtctctctgagcttacaggctctggaaacccaaccgcttccctgtttccccagccgtggggatggtagctgtttccatccgactgttcatgggtgcttcttctcaagtctaaagccagaggactgtaaatgtatgttgtttaagccacacatccaaccatactggttcaggaaggcagcggtcttccagtagttagttagctttctaaaaactccctttaaaaatgagactttagaaagaggatgacaaatcctgaggactcgtgtcttaagcaaattttctgtctagatatttattataaacctaattgcatctgataagtgctgtgtatgtcatactctatcaaaggtaaaagggttattaaagtaacctgcactttttagagcaatggtggatggccttgcagaaggcacatggcctttatcagtcaactcactgtggggaagctggagaaataaagttcaggtgagagtaagccgacagttctggtgtgattttcttgggaggataacgtataatgtaggtagcaaacacatgggagaaagaaggttttgcattatgagatttgacttaatgtgtacagtttgcttttggtgttgtaaagcagtaaagaggcttattgacatctctattgaaggtcattgcagtgcatgaaatgtaaatcaaagtgttattctttattagaagctagaagataacatttacataacatgcttttaaggtaatgagttaagttcattattttttattactataactgtttgaagaaagttattttcatgctaaaaatactcctacttgaatccgatttgtcataatttttgcatgatgtataatctattgttaggaaacgataattccatttatttttgtttctgggggaaaattgttagacagctgtttcagtctttccaaataaactcgcttccagaattcctagtaagtagcaatgctggttgataggaatgtcaccatttttctgacccccctcagccttatcacaaagacatagtgcagaagccatataagaaatttgagaaaaggaaaagataccaaggcctaggtatttcacaaactggataattagactctgaattgcgacgaataggctgaaagaaaaaaatgtcacaagcctatagtggcttaaggaacactgatttcacagtgaaatctttctacataaattttatggttaactggtaataggaataaaactgtggagcaatgtcagacaattctgttatgattcctgcctaatgaatggcaggctttcccttggtattttctccttaacctgcccattgccctttctgtatgatcacattttctttaaccagttctttgctcataaataaagccgtgtgttccggttcaaaagttgcatcttcatttataaattcacagaatatgtttttcagggaaaaatgtaactcaatcagctttgcatggtttacataatgtgatagtctcatatttactatgtggttaacaagaaataactgttaccaacaaaaatcagagaatttaaaaacaacgaacattttgcttgggagcctatgtatatctctatataaatacatatagacatctataaacatcatcgatccttcccatgtgcacatgccatatatatgtggatgtgggatgatacttgtttttatatatacatatctatatttatatagctgaagaagtgaaacatattgctttttatttaagtgactcaatgcgtttatagacaagctttattttacagtactttatcaatgccgagatgataagatactgctttgatttggtcttctaaaggtcaaaatttgaaagaataaattgattcctagagacattcttatgctatcattggccttatattgaacagagaatttctaggaaaattattattcctcaatggaaataaaaattcattttaggtagcttaatcaatttgaattattcatttatggcattgctttcaattgttgatgagtgtatttgtgtactgggtgtggggaggtcttcaggggatgggaaggtggagggatgagaagattcttatagcactaaactgaattttcaattccctgctaaagtgtgaagaaagaagtgaagtgcttcattttcttctttttagaatcatttagcaaccacagttcgtactttatattttttatggagtactttcaacaacttgcttttgcagttgggaaatgacacttacctggattttcttgggttctttattcatgacatcaatgaagactactgctaatgaaccatagatgaagttacacatatgctaagcagggaaatgcaggaagaatgtgaaggtcctagagtatctcaattcagcatgtaagtgagttgtgtgcacagtagcacagttctgtcttatggctggtcaatgctccatattatgaatttacataggctttattttaggctctgaaataattatttttattatatttctcaaatttgccaaagtatctctgagagagattcagatcccatctgtttgacagctgaggaaatggggacagttggtacaatggtttctcaacattagaacacatctttttttttttttttctttttttgagacggggtctcactctgttgcccatgctgaagtgcagtggtaccatcagggcacactgcagccttgacctgcctggcttaagcaatcctcctacctcagcctcctgagtagctgggaatacaggtgtgggccaccatgcatggctaatttttgtatttttttgtagagacatggtttcacaatgttgcccaggctggtctcgaactcccaggctcaagtgatctgcatgccttgggcctcccaaagttttgggattaaggcatgagccagcacgcctggccagaacatgtcttaactttttaagattcatgatcctgttgggagtcttatgttgttgctaatgttgcttatgtaatttactttcataatgtcctgtttccacctatttttccctctttgtgctgaagactattgaagagcattgactagtgacattcagataatagtctggtgagtttgggttgaatgttcttttttgtgtggcatgcttggatatgtgtaaatatgtaagaatatagggaactaaatcttacttttcaagatgctatcgtgacacctctgcttgttaaaatgttggataattgtgagaaaacacacaaaaaaatacaaggaccccgtcacacttctttattctctttcagattttatacacttaaacagatttacagcaaaaaatcctccaatgactttttaaaaacactgttatgttactgataaactgatttttgtctgtgtcccttcgtatatattcacacaattttcatatttctgggttattcatccttgcttcacatgtgttatctcacggttaaaaaaatttttgttggatgatcaaaagcaattaaaacattcttattcagtgcttacatacttttgtgttctttttctgtgtcattttttcatatacagaatatgttttccaatagtttacattctgaattttttaatgaccagtgttaaactgttagacttaccatcatttacttaagtctctcctacatatttggtgattttggttatttctgtatctttgcacacgttttttcatttttgtttctattttctaatatgcagtttttatagcttcttgatagagtctttgaaattttgtttctgtgaaattgtgtagtttcatagaactaaatttgctctacttaactgtacctgatgaattcatattagctataaatatttaaacattttatataacagacagcaaatcatcatattgctgggaatgtaaggaagataaactccatgcattctagaagtcattagagattttgcatataaagaccacagctagtttcaagatctaaatcttgaagcaggcattcaaggtgtttcaataagtacttaacggtaggccattaattcatgtaatcatttaggataaatgatgggcagaaaagttactgtgcaaaaagtattatttggagaataatggatatatgaaaacttacataaatgattatttattgtaatttttgttactttcaatttcttggtcatggcaaaaattgaaatgcaaggtcaaacagaagagagatggagaaagctctaaccagcaagggcctggactctcacacttccctgattggagctgctgtgtgtgtctgaggagtcaccattgctttactgcttatacctaaacagaagtatatgtagctttgcttgcactgaggatgtttataaatcctctgggttttacatttgatttactttcttcctcagccttcccatctcatttgaagacacctttagttttttcatttctcagacttaacctctagggaattattcatatctccattttctcttatattgtacatttaaagtcttcctaaatgttgttagcttatatttattatctatcgctgcatagcaaacattccccaaacttagtgatttaaaacaataaccattttattggcacacaaatctgtatgtagtttacctgcttggactgagctcagccagttggttctcttgttgatgtcaatggtggtcactcatgaggatacagtctgatggcgggtggacaggagggcctggttggtttagggagccatcaactgaattggctcacttctgttccatgtggtttaggcctccagaggatagctcagggttcttcacatcatggtagaaaatcacccagccgcacaaaagagcaagatcaaatgagtaagcactttttaagtctctgcttacatcatgcttgcagatactccattggtcaaagcgtgtcatgtggcatagtccagtatcagggtgctaagaaactccacaaaatcatgggtgaaggatggtgttattcattaggagctcttattataaccgtttcccacaaggttctgacttttaagaattcaaccacttttcctaacctctgttgctaggactttgtagcactctggtaatagtctgctaactggactgcctgctttagcccttgaccttagtctgttttttaatggagcagtgatctttaaaacataattcagatgttattcctcctcttctcagaacacttcattgaccttacaccttatttagttaaagccaaagaccttaaaatggtatgtggcttccctggtacctctgtgatatcatttgctttctctcccactctacaccagccacactctttcttagtgttctgcaaatgcaccatgcaagctcccacctcagggtcttcacatttgttatcctttctgttaggaacacttgactcaggttctccatagttgggtccttcatctctctcttcactcaaatgtcatatcagaaagccttccctgaccacactcttgaagattacagtcatttcctcttctaatgctcaccatcgtgtttcctacttagtttttctccatccaggcctccggatcactctccatcctgctctgtgtctcaagaggctaaccttctacagttgcataatcagactgcctttctctcgttctctcagtcttctggttgggttcacctaatgggaagctgtagctttcccttcattttgcttataaacctttaaaaaaaaacccaaaaaaccagacagtatattattttagatttagataagaccaaactaagatttagtgagcattttccatgaaccaatttctgtgctttcagatatgtcatagaaaaagttaagtgaactgtcatccctgtttaagagtcagggatactgaggttgaggttaaatgacttgttcaaggtaacagttagaaaataaacaaacaagacttccaaactcacgtccagtcatcttttccatctacagccctgtctccgtaagtcatcactgaatgatcgctgttacacacacctttggaatttgtcttttatcacatacacaccaccaccaccattttctggaaacttcttttaaacccaatctgactttttaatcaagtctatatttgctagtctcaatagctgttaccttcatcctcttacatctaagggcatgttcaccaggagtctttctccggaatcaccaacctcctcttctctcctgactcttcagcattttaatatgctcatttctcctatcttaaaattaaagatggatttttaaatttaaagatgaatttaaatacgcccacccccctccaaattttgagactaacttttctcttcattttgttctgtccttttcaagccaagttttctcacacgacattctgtatataatgtgccatgatctggcttctttccacaacactctctgaagattccacctcaaaacgtcatcagtagcatgtgtgattggctttgacctttctactgctttacctctttgaagcgttggactttggaacacagccttcttctatacctcctactctctttcaaaactcagctcatgtctacctcttcatgggagtttttcttaacacagaagactgatctgattgtccctccagcttgtcctcttgtatgctggggcatatgccagcaatcacagctgctgagatgcttagtcttcctgacggaactgtagtttttggagtggtcaggatcatgtcttcagaacttgcaccccagccatgtgtctgcacgtagttcagtgaccagaacatagtcaacactcagtacatgcctgatgaatgaacaaatgagtgtgaccatacttaacttggtgaggccatttttttccgtgagttttatactctgggttgttttcctaccttggattctctgacttttttctctctcatctacttgcctgactttcttaggtcttttaactttgtttctccatctttacattaagtgttgggatacagggctgaacaagaacaggtaactgtcttatggctttacgtttatgtgttttcctctgaaattaggcaaatttcctaatcttgctgaagttattttcatccttaagaaagtaatattataggtctttatagagtggggcaggatcaaatgagcatgtttattaattgcttagcattatgcctggcacaaattcaattaccattatatggtaataattttaatagtaataaaccatatattacacatgtattattcataatcagatgatgtatgcattatataaaaattgtactattctataaatattgtaaaaaaagagtaaataatatacatcaattgctttgtgcatccatatatttttacgtgtgctccttttattaaatcatatgtttttcctcagtttattggttgctttttacttaccaaaagcttctgtccaaaaaaaatcaaatgctgcggctgccctgagcagagttcaccttggaagaggctttaattgtgatgaacctgtaagaacaaagtttaagaattgagataatcagcagctgtgtatttctttaaatttttatatttaatgatttatttgaattaactgttaccacgtttacatcttctagattagtttttaggcctttacttttccttggctgtgggtactgaccagcatggtggtaggtatgattggggtgtgtgtgtgtgtgtgtgtgtgtgtgtgtgtgtgtgtgtgcatggatagatgtgtgtgtatgctcatggatgtgcatgtgcatgcatgaatgcataatatttcaaacacatgctcagtgattgagtcactgtcaggaagtaaacttggagaccatgttgctcgatgccacaatagtcctgttattgcattgtcaccacaggatgccattaaaataggtatgaagaatgtcagtgttcattaatttggttctcttcagagaacattagccatggggaaaagatacagtagaaatctgagaagagatggaagataggagagaaacctggcttttgaagaatgatctttgatctttcagaagaggaatacatgtcaagagcttatctatgtgaaagaatttacatgcaaagcaaatcaagaacatagattttgcttatctttatagattatagtttcatcttagatggcaaagaaaagccaggcttctctatacaaagggatttgcatgtttatgataactcaattagccttaacagagactaccagtatatgctggctgtctggcctcaaactttaatgcatatgtattttcaaagagaactaaaagattttgggattgtaacacagagaaagaagagatagagaattatcaaacattggggatcagctttaaaattataaaacaaattatatatgttctgaaaaattacttcaggaataagcagcttttttttaaatatgagaaagcaaaatcatatcctgtatgccattaaaggttattgcgttttccaaatttatagttgcaagtgatggaaattttctttaacaaactgaaggatgcatttgtagtctaaatggtagctttgagagtagttagatatttatggaaaaattataagaagcaatgtgcttttaaaatttttttttcaaaaatagatattggttaggaaaactacactctttcactatttggtaatgcatattctgactcattcacacagtcattgtggcacctaaagtgttgcaaaattagacatttatatggagatgggctattgatgtaaaaaaaaaaaaaaaagctgagggctaggaatgataagacatgagtagagggttttaaaaatgagctctttgttttccactcttcatcatgcctagatctcagagaggttttgtccagtgagaataaagaacccatgggaattatgcagaaatcactgtccagtaaaaggaatagttttccttcagtgaccaagggtgggacctgaagtcagcactagtcagtgacgctgttttatcgtcttcatgccaggtgaagatttgcataggtgaaatgcccacttattaggagaattacaccctgacagaaatccaaaagatggtgcccctttatcttctatcaggggatttcatctaatactagaaggagcagtaagataccatgagtttgttaccagttattcactggcctgatcctgaaggtcattgcctttcttcagtgttatttgctcagtatcctgcctgctacccttaagcacttactttgcctattgaaatcttactagctattcattcagaagtaccagtatttctttcaaggttgatcttatgatgctactgtattttttcttgccttttaattatttttttaactttttattttgaaaaatttttaaacacatgcaatgtatacacagtagtagaataatcttctgtgtcaccatcatacagtttcaatatttaccagcattctgccttcttggctcatctatatataccactcccactcgattttgataaattcttaataatagactatgagatccttgaaatttgaaactataattaaatatctgtctatagacaccatacacatatatatacagctatatatgcacatacacacatatatgcatagacacacacacctacccctttattttattttttattaaaatgtaacgtatcctcattgtggagatagccaatgttaatattttgattactgtgtagattctatcttccattggtttttaaaaacataacatgaaatttgtttattgcttttaaacttcatattttaccatgaatattttccaatgtccttgaatgttttgaaagtgtgatttttaaaggcagcgtaatattccatcacatggatcttccataatttattttaagagtttgcaactgttgaccacatcttaaactccttgcacataaacacttgtctgcatttgcaaggatgttattaggatagtttcctagggaattattaggtgaaaggctctttatgtatcttgccaagttgctatctaggaaggctgtgccaatttgtattatttttatcttattaacgtggtagtcgacatagtatctggttgtgttcttttagaaattggcattttctggattaatgacactgaacgtttttcatgttcatgattcttattacatgtgtaaaataaggtgttatctggaattgtagtgaatggtacatgccatttagtttagctccaaatctagtgctttgcagcaatgattaattatttttagtatttcacaaatcagtttttgctgtctttggaccagaatgtctgcctaagtgcaagttacattagttgagagttggtcttattttactttttgagtattattttaaaaaattgtcactgtgtataattttctccctttatgtcatgtaactttattgagaaatgcaattcaatcaggaataatttagtttaggtaaaacttctttgtccaagaaatatactgtcaggtccaaatacattttaagttttgaaaaaaatatttatttagataaaaatttgtaatcactcagggtatttgactggatttgaagcataatttacttccagaatgaatttagaactctgttgttaaagtacttggtacaatttgtatatccagtaaaataaaagttgccatttttgcaagtcagtgttttaatgctgatttggtacttttgctatgtgaaattccccatactccagtataggaactgaatgaaaacatataccttattaaaatagtagaggtaagtattttcagcttcctaaacagcagagaatgctttttttttttttttttttaaacttttggaattactctattacctacatctaagttgcaaatccaaaaataaaactaggattttattaacatattctgcccttcattgcttccggttatactttgctgaactgtgttcgagtatgttgaaaaataattccgtgtattgtgtgttgaaaatgatattaaaagtatatgtgttatgtggaagaaacaatcaaaacagacctactcagacatcaacaggatattattaccccaaagaaatgacgacagtttgccagcttgatgcgtaaaggaaggaaatttacaaacatctccaagagaggcatgttgaacggttgaaggaaatgaggcacgtcctgcttttattgtgcttattgcagtgggattcccagaagactgaacaaggctgtcctgagacctctgtttggcagagatcttgttgattcatattttatttttgtttcagaaaaggtctgctattgttcaaatttctaatgtagctcataaacacacagccagtatcatttccccttctactgactgatatatacaaataaattaaaatctacggtcatcattaactcatgttctgtttccatggagcacaggagagtaacaaggaaggccccttaaaagaaaggccttttaaagtggaggtctcagttcacaaactttaaaagtttacgaagtagtattttagaattttaatcaccagatatattgggggaatttattacttcctattcatatggaagaggacagcagaggtaaatatttatgtaacttgtattttaaaagcttactcttgattaaaatgtttgatctatcgacttctgtatccttagaagtttgaattgctggacatatttgactggggtttttacaaaggcttctaggttgaaatgcatggttcaggattttggtttcaaatttctgtcaggttggacacatataaatgagaaagtaatgtggaatattataaacatttctgcttttttaagctctaacttttttttgctatctctaccaaaatgcctgaaaatgtcatgactctttagacggagaaatagaggaatggaaaccattctggatcctctgctgtgactcagtcagtctaaggggcagactgagcgctatatctggagttttactttatgaatgtgcacctttaaccttgagtcagaaaatgtggttactgtcagtcttactcagtaagtggtgctgcatagaacatcagggggagacttggccttggtttagtagaaacttgaaggagacaaacatgaaaagcagtgtcagaaaatggaagaccagtgttaaaaatctttggttttgctttcatttctcttggttatttcttaggattattgctttagatcattttcccaggcattttcatggatgaagaattccaaagaaagttattatttcaactcttgaaagctacgcttcagggtgaaggtagggcttgattatcaaaggaatttccctggctgcagtcctaacagtttaacttcctgtgatttccccccgcccctttccctttatttttggctcagaacttcagtaatgtctggattgatggaattcctctgggaggcagatttgagggtctaaaggtgcttctcaataaagattttgaggaatgatattaacttattagaggcaaccctctattgttttagtataaaggggatgagatttgggggaatcattttggatgtcacattaagccactagccattttactcttgatgaccttagttgcctttaaactgtatttttagtggggatcattctttcaacagtccattcttttttaaacgcaatttggtttataattctgggggctgcctctacatgctgtactgtcaagagagacatcaaatattttctgagtagttttcaacacagtgaattaaagctgaaaaaacaagtagcgatactaccagcatcttaactgagtatgtggtggtggtgtttgagtgtttgtgtgtgtgtgtgtgtgtgtctgtctgtgtgagtgttttatgttgctgtacctacttgcttttaggtagctacagttttaccagagaagagaataacttagattatatcaaagtttttttttatataatggtttaaaaacctgccctgtgtctagtactcctttacgaagtccgcaagacttggggataacagtggacaataatgttccttaaggacttacagaaataagacacacacagatatatttaaattccaattaatctgatttttagtgtggattattgaagggctaggaacttagactcagaaatggagtatttttcctgtttaaaatgtaaagagatttaataacatacaggagtcttgctatgatttttgagaggagatttactctaatgtttcagataatctgtttaacagttaataaaaatacgatttacattttgtttggattttttaaagtcagcacataatttctaaaagtaagcaaatttcttgcagggatggtgaaatgaaaccttgtagcatttagcgtgtattgcggttttgttatttgcagtttgttattaagtgttcctaggaataaaaggaggtgcacagcaacaatgtttactgtgccgatttctggtattttataattaaagagcaagtgtgagctgggaagggtgggctggaaagcatggattctggctctaaatctcagctcgaccacttactacctgtaacctggggcaacacagttatttaatttctctgtaaaatgaggataatacaagtccctgcttcattgggctatgggaattaaatgagtgaatgcatctaacattgagaacagtgttcagcccatagtaactgctcagtgagtatttttaagctattagcatgatcaaatttagagaggagaaatataatggagcagtttctcagttcttgttagaaataatcattacatttgaaaatccaacaaaatattaacattcaaaacccattttcagaagtggtggtggtagaattgctataacggaggaaaatttaggaatggcagcctggttaaaagaaagggcgggtagacctggagtaggttatagatcaatttaaagcagcaaagttttctaaaggtgcttctagttttactttaaatgagtttgcagttgcacatatcaaataataaggtgttatttgccagaggcattttgttggtggggggtgggagaaagttttggggtatattgtgtgtgttgggggtacatttccccggctgcctttttccactgctgctggtcctctggtcaggaagcctccctgtcccgcactggttctgttatttgttcttggatagcatcaacttgaggatgagactttataggcaacacattagcctcagtgtctcctcctggttgtagtcatttcccggttacatgggtcagtttctccaccttacttgagtgaatgcctagaaaggctatttcagcctagagaatttttaggggaatggagaagctgagggtaactcctcagcaccaacacttgaacccaatcaatacttgatagattactcccagcacacacaatacacccagaaatcttctccccaatccacacccaattaagtttcagccaaggttagaattcagtggttccctctgtgtgtgtccccttagctgttgctgttcaggtgcaaaggtgttcatttctttgtctacccatgtgtagttgcctgatatccaactaaactgcatcaaaatatggaacccctaggtaggcaaaaaagataattagaatacagtagtccccccgccccccttatctgtagtttcattttctctagttttagttactgtccatcagctgtggtccaaaaatattaaatggaaaattccagaaataactcctaagttctaaattgctcgccatttgatgaaatctgcactgtcctttgccatctcatccgggacatgaatccttactttgtccagcagattcacactccagacactccctgcctataagtcacctctaggttttcagattgactgttactatggcagtgctcaggttctagtcacccttttttgacttaactatggccccaaagcacaaaagtagtgaatctggcaattcagatatgccaaaagaaagccatgaagtgcatcctataagttacaagggcaaagttccccacttaagaaaaggccaggcctggtggctcatgcctgtaatcccagcactttgggaggccaaggcgggcggatcacctgaggtcaagagatcgagaccagcctggccaacatggtgaaaccccatctctactaaaaatacaaaaattagccagacgtggtggtggacgcctgtaatcccagctacttgggaggctgaggcaggagaattgcttgagtctgagaggcggaggttgcagtgagccaagattgtgccactgcactccagcctcagtgacagagcaagcctccatctcaaaaaaaaaaaaagaaaaaaaaaagaaagatcatatgctgaggttgcagtatattataattgttctatgttactcttagttattgttgtcagtctctcactgtgcctgatttatgaactaactttatcataggtatatatgcataggaaaaatcatagcgtatatagaattttgtgctatctgaggtttcaggcatctgctggagatcttaaaacctatccctctcttagagtgagtactgtgattatgtttaaataaatgaatgcatgcttgcttgtggaaatatttttgtgtgtggggtatgtatatgtgtgtgtgtgtgtgttgcatgtggacattttaatgtgtgtgtattatcctagctgatggttttcctttggacatttgggttcattttgtagaaagaaaatgcagttttagaatcaggaagctgattggatgattccatctgaatatatgtgtgtgtataaataaaatatattatcaaaagcctgacttgacttgggaactgggaagtagcagcctcaggtcctcctaggtttattggagttacacttattagtaagtagcctaatcctctctgcaaagagaggaagtacagttttatgatagaatcacgtgggatgaggatcattgaaccagagagaaactgctgctgtttgatttccactgcaggtcatcagtatttcttgatctagaacaatgataaaaagtgttctggtctttaagcaaaactcagatttaggctttatccttagaatctgatctttaaaactggaagcacaagctttccagctttgaattcactccatttcagagatgaagaaaccatttctcaaagaggtgtctctgttgaggtttcacagtgaacaagtcaggtcagctgaatccaggtctagtgttatttcctgcaaatacattttatttttcatttttgcagtaatctttagattaaacccactcctatactgttggattagttaggcacatggactgggtgtatgtttcccagatttgaaggttggttctccatgtcatagttatttgttctggttgcttttttttttttttttttttgagacggagtctcgctctgtggcccaggctggagtgcagtggcgggatctcggctcactgcaagctccgcctcccgggttcacgccattctcctgcctcagccccccaagtagctgggactacaggcgcccgccactacgcccggctaattttttgtatttttagtagagacggggtttcaccgttttagccgggatggtctcgatctcctgacctcgtgatccgcccgcctcggccttccaaagtgctgggattacaggcgtgagccaccgcgcccggcccggttgctattttttctcagttttcttatctgtacagtggcggtagttatttcatagaatcatactgaggactaaataagttatttcttgtaaattacttacatgagtacccagcataagtgttagctataataattattatgttattaatgattatgtcattattatgtattgttgatagtaatataataatatattgctttttagacactttagttagctatccagcatatgacaataaaaaggtggctctattgaagagaaggattccataattttcttgtgaaattagcgccataaatcattgaacatcttgcttcagttttgtgtgaattatttggattgactaagtactcttggtactgggctgagttaccatctgctgtgttttgcttccataggtcaggcttattctcctagggaatggtgaggtggaaaaaaatgccaataacctaaccccaaaatgtatcctaactgtcttgttcacatttataggacagttttattgctgtaggtaagacggataactgggcactattccagcatcttggcagttttccttttttcaaggtactaatattaggattagcatgttgttttaaagccattgcctttctgcaccttataattgcttgttcttgggggaggcttggaacatttgaattacggtttttctgccaaatatgggagaggttgtctgttttgttttaatacttcgattggtttttaaagttggtactacagtccattttgccaacagacaacacaaattagaggcagtgtgggcacactgtgtatggggcagatgcagagaggggcagcgaatatgcatgagcgagaatgttatagctctgtcagtttttgtatgtgtgcctcagtttatttttggtattgataccaatgttcggcaatacagtgatttgcctcctctattttgtttctaaatcaaagccttggcagattaaaatgactaggaaaagattaaattgttaatggtataatcatatttttctctaaagcattgaagaattacagtgtctatacttattagcatgtgataactttagtgattgaaatgtttagctagttttactcaaatattagtaggatttctaattttcataggagagcctagtgccacaaaagttactggtaactagcactcttcagttttcatcttcatgtaactgttgtgagcattcaaggaaggagctgggaaatggtttagtcttcatagatgctcaacagatgtgagttctcttttctcccatgtatacgtttcttatctttttgtagagttcatgggagcagcatttatggattcagacttatattgttgacaatgtccttgctacctgatagatgatcagtaagtgttgcagaacgaatacatatgagagcagcagagataggagtacattagggcaattagaatagattcctttttttgtttgttttttgagacagagtctgttgcccaggctggagtgaggtggatcggtctcactgcaacttctgcctcctgggttcaagcgattcttgtgcctcagcctcctcagtagcgggactacaggcatgtgccaccacacctggctaatttttatatttttagtagagatggagtttcatcacgttggccaggctggtctcgaattcctggcctcaagtgatccgtccacctcggcctcccaaagtgctgggattacaggtatgagccacagtgcccggccattagaatagatttcaaagaaaagttgactgtgccaatctctgctccctcctgtatgttgttaagtctacagggccatattgcctaaagaaacggagttccccaagaatgtgttaggaataacaaaaattctgtactttgacctgaaaattgcggttcttgagctggttatttttctaggtattgttggaagttatgagtcagagttaggtacttattcgtggataacacaaggacttctgtcagagatctggatgctgtcagtagaatctctgtttaccctcttgggctcagtttattcatctattctatgaggaggagtatgcctgtttggccttcctcttaggttgcttttgagaatgaatgaaataatatgtgaaaattctgttcataagtgtagaagatggctagtgatgatgatgatgatgatgatgaaattgatgatgcccaaaatatggagaatctagactgaatttatggctttctaacttcgaattttcggctttctaacttcgaattttcaggaatgcatgatgatagaatgtttttatttctgatatccactgcattgtttctatagaccttcaaagtttgacacaaataactaaattattttgttttgttggtgaggatcacttttattttagcggtgtatcctgttaaaataaccttgcatgaggattctcaaagttatactaatgttgcactagtaactaaggcagttccaaaaagagacatttagaatgaataaggataaatcaaaagtaattcatatccattggtaaggaggtggcacataccaagtgtcaactgtagatattttagaaattgaagtgttaccatggaatcaaagtattccactgtaaggttgaatatctcaggatacctactttaagtcgtcgattaagatgaagttaatattcattttacatatcctgcttgaaacctcttatgctgtgaaattttcctgtctattaagaatagttttagaaaaatgaattagctaattccttaacttgtatgtaacttgaatataagttcctttccttaacttgtgtgaaaatcagttctcctttgtgaagagcatgagagatacctcaataaaatagtaattttatattgacatcggttgcagtttcaaagtcagagttttacacttatgtgcccctatattgtctagctttgtaatccccactttaaaaggcatcccaaaatagcaacagaagaataaattgtgacttgggtgtattagatttgtatgatcttgtttattgagctgctttgttatgtagttaccaaggatgatgtaagcttctcatccaagttttcctttactatgctgcattgtcctttaaatgtcatgagaatacaaatattttcaaggtagcagtgaggaacaatctagatgagatgaccaaaaggacctctcatatgaaactgcagtgagcaaaggtttattggtctttggatctctaaatagagtgactttagatatctaaatttagtgaaaaccagaattcagtgactttagatttcagaccataaggggttgtaacacctactccttttctctgtaatgaagaaaaatgaccacaacaatgtggtggatatcagaaatagaaacttttcatcgtcatgcattcctggaaattccaggttagaaaggcataaaagagagagaaaacctgtcatagttagtatatctaccttggttagtgtttttcacttaggggattgcaaattcatatgagaattgctgagagaaacaattaatttagaacaaatattctccttccattgttacagcctgtaaaatgttacttctgagttgctacttatctatcaccatttctctttctccacttcattgttagtgtttgtatgattagggtgggcgggggtcttctggatggggttgctcacactccacaaagccttttccctcttctgttgaaagaagacacagctgaaatcagtctctttgccttttcatgatatggggatgcggtggaatcaaagcaggcaggatgaaagcccaaaagcttcctgtttccagctgttttcttcagcgaaggttttttttttttctcccaaagatgatgcttcctttcaaggggtttttaatctgctaactgtttcctcagtttatttcactacagtaaaatgtgttccctttaggtcatatctgtctcttttaaaacccaacctgtccttttcagccgtgttagttgctactcaaaagaacaaacgtgatttataaaagtccttttaatgaggtacaaagaccaataaacctttgccactagagtttcatcttttcagttgctttattttcatttatgaaaaatttgagatgtcaaaaagccattgagaacactattgatttgaccatttaatatttgtaaacaaagccgttaaaaataaaatatattgttatggccttaaggttggttgtggtttttttttcccttccgaatgcagtataatcatatgtaatttgtttaatgtaaattctttaaaattaaggcactggaaactgcataaatgctaaaatgaatactaagagtggcttgatttattaagtgataatgtgcatgaaaatatggcttttttgcactgatgtttattgcttcactttttgcattgatgttgttttggaatttacatttctaaattctgcatcctctagggataaatgaaatataaaaatgaattcttttaatcactcattaaacattaactagacctttcacccatttcctagatcttccagggttctcagtaataatcatcatcattatacattgatttataaaggaatatcagagtgagtcagaatttttctgtttctttatcacttgtctttccccaaatatccatactgacctaaacgtaggagaatttatcagcaagaaggttcacattgctgccctgttatttgagctcattctttgtgatataatgaagccagtggcatatgggggagaaccacctcatttcattttcactttaatgctaactctaacatatgcttttgaattgaagtggggtcccaaatgccaatatatgttaaaagaattaaacactttgaaaaaagagaaagttttcccttatttactcctgttgcccactctcttgagggtgagaggctgatagcgcttaaaaacatgagcatgcctattttatctgtactgtttaatagagagctatgaaaaaaatggcaattaacatattcagacagaaaatcatcctggctgaatgactcattaaatagtcgtataaacaggatgtgccgaaatgaactggttcagaatttagttccattggtcttttcagcacacactgctcattatcagcactttaagaagcagacttgtgggtgcttagaggacacttaaatttcttttctctttatttttttcttaaatacttctcccctcctccactcctttcccctgctattcctaattctttgcaggctaagattactcgtctaaacatgaaacattctgttggcaatcgagttaggggtaagagcttctgactttcatccaggtcggtggtcctaaccccagatgacaatcaaaatgtatttgaagatttttttttttggagacaaagtctccctctgtcgcccaggctggagtgcaatggcacaatcttggctcactgtagcctcagcctcccaggttcaagcaattctcctgcctcagcctccgagtagctgggattacaggcgtataccaccatgcctggctaatttttgtatttttagtagagatggggtttcaccatgttggccaggctggtctcaaactcctgaccttgtgtgatccgcctgcctcagcctcccaaagtgctgggattacaggcgtgagccactgtgcctggccatgtttttaaaatatgcagacattgctgaacctcatttttttgggcttcccattcagtaggtctagaggcaaggcctggtagtccgtattttaataaaagctcccagtaggattcagatagccagccgggcttggaaactattcactgatttgtgtcccctcacagtaaaaatgctctttccccaggtacaggatatatggccatctggcctggatatcagtggtttgcagacctggctgcaaattagaatcacttggggagcttggagaataaatactgatgtttgaccccacccccaattaaattgttggtggggggagtagttaaaacctccccagttgattctaatgtacagtcaagttagagtacttctgtcctacataaacagatggagctaggtttagctgaaaaagtctagttttcttttagaatatgctttaccctgtgctaaaactcctctgttactgtgcctccctagccacacacacagagcttaaacgtattgcctctactaaggctttcacatttattggtaccctgttctcaggtgggagtagaatgctaggctctcacgttgtatcagattcctgtttcttcctacctgagtatcacatctgtgatgtgcagatgtgttggtatagcatgagcaccccacaaaggctaagtaataaggatgaagaacaaaattgcagtttagcaaaggaaggagcatccatcttttgagtccctgtatactccaagaaaaattctgagtaaacaagtttcttctttagcaagttgtgatattaaatgggtgcctttcattacattggctaacatttgcatttcttggacctgttctggaaaagggtctgagatgaacccatcgttgaagatctaaaaaacaaaaactttcaccatgtcaagggaaagaggaaagatttccataagtgtaatcttgtattctggatggtacatgaaaactctacttcctaactgcccacagggatttaaggggtattttaaggggtacttacaaataaaaggaagaagatacattacatcacattctcattaccaaggagaaactcatcctctctaggaaaggtttctctcctgtcttacgtgtgactttccacctgctaagtccccttgaagttactgagcaaagacactcttacaacactaagccattggtgctagaagtggaagtagacggagcccctgaggttcaggtgccaggtccttgtatctctgatggcgtgggaaacaaaagtcagcagccatttctcttcactagagactcagaggaggtaaaaaggggggattcacgaagtcatcttgatttttccgtatcttatggcgaagtcttgtggtagaccccagaaccctgatggttggtctcacgctcgtaagtttacataaggctttctcaagaaactgacatccagagcgcttgccttagagaagacagctgaccatggtcatgacactggcaggtgttaggactggctggtctactctggtatggcagaaaccctgggcccctgaataagggaggtgattatgctttaaagtctaggcttaccatgtgtagggctgtgggactcactgtcagggttgtgtaaggcgagggccatcgcttgcagaagtctgagtgtgtgagcacccccttaaatattgcccccaggtgctgtacttgcttaaccccggacccagccctggcagggagcaacagcaggagggaaaaccattggtaatttaggtcttcacatcttatgcttcatttaatgtggttgataaagagcctccttgtaaaaatatcttggtgtagactcccagggaaggaaacacttgtgtgactgacaagctggcagtgcccatggccacgtgtgtcaccctggtggaggataatcgtcctattattttttgtcagtaggtataacaagtgggtagtgctttgtgtattccactgtgatgaattaattttgtgttcattgtagtagcactgatcataatgaattaatttggtattcatgtggatgtcagaggtttttttttccccttccaatttcatgtagctttagttaatggatactttaaagtacagtacatctgatctgatttctgttctctcattcacttctcataattttccccccgctggatattgtgaggtcttctgtttttaaaacatttaacttgatctttaaataattaatgttttaatagctttacatgaactcaaacattcctcctgcttttaatttataaaataaggaaaataaggtaaatagttataacaaatataactgctaggttgaatgatatacttaataacttgtatattttagtttggtttaaaaagatctgaactaatcatttgtaatttgtagccttattgaagacaaatattgtatccccttatgcaaatatgaaataatgaaaactgcatgccgtatataatagtttgctcttcttttaatttcttctctctttccctcatagacaagattgataaatgtatgtgcatatattatttatctgttcatataaggacatgtaattgactattagatatggtaattgcataaatatatcttattcaagctcatttccttttctgtttataaaataaatgtttttgttaaattggaatatgtactgaaatagaagtgcctaatttaggattcagaaactaggtacacaaacaaaaatcaaacaaaattctgggaacctttgacaaacttgttctttaacctatatgtgtttaaaaaatttgttcatcatgtttgctgattattgaagatatttataatagaataagggtttccttcatcactaacacacctgctcggctgatttgctcccagtggaaatatggttgaacctttagaaagaacgatgtttttttgccttacgagtatcaggatgccatttttggtctttctttaaatttaaacttggaaatggtatcctccatatattctcttgtggctttaaactttttttttttttttttttgtaattttacagctcttgttcagtttgattctcagcagcagctgtattccattgtagactgctgtgtttcagcaattgatggatcctgtatatattctactatttagagtatataaagaagttgggactcttgcaagtggcaaggactatataactgggttactatggctttcattatttttgttattattgtgacagattgtacagtaatatgctaacaaagatttatggcatcatgcagcagtaggaaatgttgggatggaggagaaaactcatgttaaaacaaatgtctataataataagaggaaaacaaaacttcaaaaaagctgagaattgtttctagtataaatatttttattaacatttgttatggttgaagatcttgagaggaactgttcatgcatttctgcagtttagattatgctgtatgcctatttgtgcatcatcgttcttaggagattgttctttcttctggttttttttttttttagtttttttgttttactggaacacataggtattgaatatgcaatgaacagaaaatttatggagggcagagttatgagtatctgaggaaagtttaattacttttataatttagataagcttcataatttattgtaacacgctgtactttggcacaatttgtaacaattataaagcacttgaatttaggttctttacttggcagctatcaacagagttagctgtatgaaaactttaagcatttactttccttcctccgccttgcattacaggcttacgctgtagtagttttgttgctcccactttcatttgccacatctctgggttttatgtatcacagtatagtaggcttgtggctatacactaggaagcagacgaagagagaacctgaagatacctcctgatgcccaaacctaggaaagggaaaaatgcagaagaactcagacgactcttggaaatgattcttgcctcaattaaaaagacctcaccactcacctccatgtaaaggacaggtcgtgaattattcaaatgattcagaaatcaacatttaaaaaaatgaacataaattccttttcataattaaagagcggtggaaaatggctcttttcttaggtctagattatattgctgttaaaggaattgctgcctagtatacaattttttgacattgttttctacaacatcaatcttatttgttgtccttttttgtcacgcctgttaaatgtgtatttttctgtgttgatattgaaactaatgtacaaagtgtgacatctccaaaaactgatttggttgttcctaaaaacattggtccttaaaagtatatttatttgcagcccaggaatttttagcttcacatttttcttttaataactaaactgtagaacagaattagctctcataaaaccttgtacttgctgaacaactctcataattaaatgaatataatgattttatgtgacactttgaacttctaaagttctttcacatctatgtatgtttaggacaagatttaaaagttaaattattctacagttggagtagaaataagtggccaagtatccaacttttgtatctcaaataccttctttttttttttttttcccaaataccttcttatattctccaccgactttttgggctggctaagtgtgacagaaatgggaactttagttctggcttttgattctctcatgttaatgtaggtttttgataagtcacttggtgcaaaacactgaaacaacttatctattggcttaaatgagtcaacagtctgaatcaaacaggttgtgaattggttaaaataataaaccagtaaccctgtggttgagctcttgatgattaaagaaccagacctaagaatgcatttatagtcttttaaaagagagtaaagactcccacttctttgagctgtgtttctttgtgtagatttctttttttttttttttaaagaaaggcttcattatctgtttcagatctttatagatgttgcaataaggtactcctttctattagtataggattgaaaggatcaaagttaataacttgaactgagatgctttaaaataacaaaatagtttattatctctttccttttcaagatttatgttcttacaagggtacaatgttcatgattgaatgtggtcctactggtaaggcttccatgtaatagaagagtaattcccttgtctagcattctctgggttgttttaatgttgcaggtgaatgtgttctgctgtgcaaataaatgtagttctcttattcacattcctgatgacttgcatccttaaacccttttggtcagggtattattgtcctttatcctgaaaaatgtctgtgattgtagtgccctaatactataaatcaatggggactgaattcagcgcctgctaagtagagtgaggcaaccctttaaatgcaaatgcatcagggctagttttaatgtaattttaataaggctgaaaccattttgaagtagacttaaatcataatactaatcttaaaagactctctatttagctgagaagtccctttattctcactggccatttttcctctgtgtgcatccaaaccacctttcatgtgattccacagtttttcatttctttttttttttttctcaaatagaatatatgtacagtttgtggttactttattagttggagaagagcttgtattgactaaaattgcttcacttctttttcttcctggttgtacatgcctgactaatctgtgtgtgtgtgtgtgtgtgtgtgtccataatatttcaatcacattgctgtgttttggtcagagaagtaaaaatctagctgtcaatgccaactggagtagttatttaagaatataatatttaagtaggggagtatatgcaaagtaatataaaaatgaggaaaacatttacaaaatcaaatgtgacctcaagtccaatatttttcaatcttctaagtctgttggtttcaccacctcacattatttcaatgtatgtgaaatatatcttgctgtttatatttgggttgatgggacaggtgcaggatctttgacctggggaaataaattggattaaggactagcttaactagtctacagaaactgtagactacaaaaactgaaggcaagaacctactgtcacatcttttgcagagagacaaaggcattttggtatttggatattttacttgggatatgtattttgtgtatttgtgtaattttgtattaatttacacaaacttaagtaaacaatatattaataagattcatcaagtaatttataaattaactttcccacatttttctgtgttcaagaattatcaaggagatgtgtaaatattgaagcctatactatattccattatttgcttttaatgtatttcatataattcagaaaacagtaatttatcatttacattacttcccttttcctattgagccttctgaaagaataatgtagaccagcattttaaaaaaaagcttgtttcaagacatgttaatagaaattttattttcagtccattctgcattaaatattgtaaaacacccctagagagtgatattatttgtaatgattcccaaattgctttgaccagagaactccttttttcatgaaatacctcccatgtggaacattctgcagaagagttttgtgaaatgctaactcagcccaaaaggttttttaaattaaggcctttcaagttggtaatggtatttagtttcttgttttttaaaatagactttgtttaggacagttttctagggtcactgtgccactcatgctgactgtcctgtcgtcttgaaaaatactactggtaacatgtgaacagatatggaggtcctctacccgagtattttaataccaaataatagctatatcttctcagatattggtagctatgtcaatggagatgtgaaattggctctatcgatggcttttgtccattctccaagagaggcctgtctttgtgggtggaggtgttggtggatatgtgtatgtgtctccttctcttaccctcttaacagtttggtcacagtggtgaccagtgagtatagagcagagccttgacaatgcacctgactttgggctttagccagatagtatgaatgagtgaagcagatgttaaggagaggtgagtttagggcaactggggcattcgtgccccctcattcattcagttaacatttccaagaatcctgtgcagggcaaataagatctatctcaggaccagcaatatctcatccttggtatgaagataagaagtcaggagacttgagctgtaggtttggttgtctccttgcctggcaggcttgcctaatttacagcaagtagaaaataatctgtgtcttgttcaaatctaaataacaatgctttaaaggtagtgtagaatatttgttaaaaagaacatattaattatgtttttagaagcttctgtaaggaagaaagaagtttgaccccccaacttttctcttttctagaactgcaaattactgctattttaaatagactttgttgtttaactgtacatccaggaaaatctaggaaattaaagaagcatgcatataaatgattgtgtagcagaacatgaacattaaattcatacagtgaagaaattaaagttagaaatactctcaaacataagaaggttctagaatcaatcctttaagcacagtctgagacatggtatatctttgcacttacttggaccttggtttctattcctgtgatgattattggatttgatgccatctgatgtcctgttcctcagattctatgaagctgagtctgagattaacttaggtctgagattgacataaaggggaaccggtccctagatttcctcagggctgagaagttattgatttctcaagtataataggactgcacagacgcacaatttgcaccaatcggaacaaaatgtttaacaagttctgagtatagaaaacactttgcaatttgaatttctatgattccaaaattcaaaaaagctcctttttgattaaatgcactgccctcaaccacacatgctcattttctctgtctactgctttgtcattctgtttatttaactttacttggcataccagagttttaacgctgagattttaaagtacatatgcaaaattggaatgtgtcagagaacctaggaacagattcatcaaaggagtcatgaggcacattgcacatgctttaacatcaaggtgtaaacggagcccattaaactattagttaagtggtgatcaggagcaagagcctgattagattacaaaatcttctgtgtgtgagcgcggtatgtgaaaacataacacttgatcctcaccatagtgccaggaagattcaattagagaactggtatgtgcccagatttggggacataaagggcaactggattttgaaggaaagatggtaaggaaacacctgcaaaaatctgcttctctgtgcaacagactgggtaattgcatatgcagatggatagttagggatataattgcttgatttgtgaacataaatgccctttcgattgtgtcagtgttgaattttgcagtgacaggtgcctgcggattgctgtgtgtgtatcctttgcacccctgtttaaatatttggcctggagtatgtcttccattcattgtgaatggaaccaccgccgtcccgcccccatgatggtctgggggtattgttatagctcttaatgtctctccaactttttctcataaataataaccttaatttgaaaccttaactaaaagaaggactgcatagaggcatgtggtgaagggcttacgaattatgcacagaattcattttttaaagctgctggatgtaactcattagttttcattgttttctcaaaataaggaaaactattaaccaacactgcagactaatagcctggattttttttcccccataatcaactgaagtttaatggaaaatcatcttttgaaagacttccttttttctccttgctttttcttaacctttccattaatactgttccaatatcttctctaatctctctcaactaaatagcattctcagtcattccttttctatgtcaacatttctataccgcactgaagatgtttgtaaaaatactggtgcagtccaaatgggatttatttttaaattgaagaatttgttaagcacttacttatgtggaatggtcaggtcatctccgtattcctttctctggccttatggagaaagtggaggaaatggtgtctgcctttaatgaggttgctaacgtgcctgaactacacaataagttattaagtcatattttatgtgattattcagtttctttttttttttgctccattctaaatcaaactatctaaattatttttgtcaaataaaggttaatttcagcagttgttgataataaacacttgcatgtactattcatatcaacgtgtatgatactctgctaagtatagtacatcagtaatctcatttaatctgtcaaacagtatatattattcccatttcacagatgagcaaactgagctataagattaagtatattactcctgccatatagttaataaatagaaagggattggagttcagaaatatgtgcctctctagcccacgtttgttgctgttttggcatctaatttgcaaatataaataaatatatctaaataaataaaaaatatcttgaatctgcctttttaaaggagcctgccaaagagaggcaaaataaccgcagaaatcccattttgactggctttgatatgaagacttcacacaactcttattttaatttcttggtatttccttatgctttgctgctcttctgaggcacattttctcagtaagatattctttatgctttttaactaaaaatgtggggattaaattttacccacaaaaaggtttgaaaccgttctttctaattcttcatgtgtcattaaaaaagtatccgcatgtattttggtgcgtgtggagaaggagctggcactgtgtgctcaaataatgctcagaaccacctgctttgaatgtggtctgattgaatcaaatgacgactgcttttcatcaccgagccgggattgggatgtgggggaagtgttttgttttgatatttcacatgtgcttaggtgttcgtggtttcaggttgtttaagaacagactctcattgagtgttggtgagtcctgtgggggagatttgaaagcaacgttgaggatttctaggtctgtttcaaaattacatcctcttgtgtggtgcatttatttgtgttcaggatgcagattgccttgtggaaaatggcaaatcattttccctcataaaaggtttcttttgtttttttgtttgtttggtcttcagctattttttttggtagtttcccctcctgagttcagattatcagtactttcatcatttataccactcggttctctggagttcttggtgcactgtgggtccacttttcttgtttggggtgatgactaacatctgccctgatactcgcctggtacttgaggctctgaactttattatcttctcttcaactgcagctcgtggcacttgtaggcaacgtgcctcccaaagagcctgaaagagattacagctcacttcctgccatcagacagtatgtggggaggtcaaggggtgggcagaggagaggcttggtgaaattcagacttttgggccccatctagaagaatctgcttcagtatctcttggagctacccaggaatatgtattttcaacagtgctccagatctgagggacagttggaattaggaaaactgtggctctaactgatgccccagtacttctcaaagtgggtgcccccacatcctgatatgctggatgtgttttgtaactgcagattcctgggctccactgggagtggtggccctggaccagcctctgtcatgtgtccccaaccacactcttgggattcgtatttgtatgaactttagagaatgaactgccacagagattctaggtgacaggaaattgtggggtaaattggaggattacagatcatgcttctaatatcagcacaggtacacacaatcgtcaaaataggggacaggtgtgtttggaaagcttgttttgtaaagaaagtcttttctccctttgacttctcttctttacgtggaagctacacttctgaattacaaagagacagagaaaaaagagaacaataacaacaaaaggttcctgaggcatacctaagctgcaggagccaagggagtgtcccttgttttacttggtgatggctgtttgaacagccgtttgctttctccttcctgtcctctgatgtgaggatgcaggattggaatcattagaaaccctaggttagtagcatcaggctccctgccctgtgtagtctctgggaggacagagctgcagcttaagttgtgcttttgtcttggcaagcacctttcaatttttatcctagctcagttgctttgtttggcattttactggccaatactcctttttttttccctctcttctccatctcctaattctcaacctcttctggggccaaaaacttggaggaaagactttaaaaaaaccaatttcactcctgtttatgtaatcgtttctatattacagaaggctatggtatgttttaaaatgtatacatctctttgcttttctcccttgtgactgaatttttgaaaaatgcttgaaatacggacaccaaaacggaatgtatgtgtgtcacatttaaacggaaaaccctgtttgttttgtatattagactatagccaatgaaaacccagggagtaaggattttcatgaccacaactgaatatagaacctcataggtttctgttataagtataaatattgagaatagttttgtttgtttatgccagtgcagttttatagcaaatcctttcaaatggggtgcaaagccatccatggatatttgtaaaggctttgcaaaatcatacataaaataaattgtccatttgatttgaacaagttttgcaattatttgtggctttaacaggggcttttgaagggcactgtatatatctaccagctggttctacttttttttttttaagaaaatggagagctttgtatacaatcccttgggtaaaccagtaataaactatatatcaggtagtcaagtcatgccatttcaaatctgttttacattttaaaggggtaataatttgtgaatttcatctcatagaaatttttatgcttcaaatcaagttgttatcccatccttgtctattttttttttatcgatcccctcactcagtgttttagagaaataaagcatacaatggaatctcttgctgggaaaaaatactttcttacttattatattgtatcttgtaataatatatttctatcaccatttaaaaaacattcttttagttattgatgattattttgtcaaattatatgaatttggttctgttttctttttgtgacaaagattctgaattttcatgtttaataaatgcacttcttcacatgacaaatgttcattgagcccttagccaggcattggtgtcaaccctggttcataggtgcccagagttcctgtccttctgaagcttgcatcctggtggggatcaataaacaaagataccaaccaacaaatataaatatatgtatgtatgtaattgattgattgatatctgtgtgtgagtgtttcctcaatggcattatgcatttatttattcattcttcatgcatttgttgtgtgggaaagaatgttttccaggttgaggaaagacacgagactcgacagccagggatatattaggtaacggtgaggagtctggtgtgattgaggcacagaaggaagtgccagtgtaaagtaacatgagaagaaagtacacacagatcctgagcaccttaaatgctagcctaaggaattttaagtttatacccaaagcaatagggagccactgaagatttttgtatggagaagtgacagttgtcagtggctcatagtagattggagtgggcacctttgctgaagttagggaacctgttttcaggtccttattatgagacgtgctagttaaaagaggaaaggaggggagggggttggcaaaggctgcagttagttacattgagtgaggtcaagtaaaatgttttgaagcatttctatggagaagtcccagatcttcttacctttcatgactttgttagactcactcttcagtgaaataagactggtcttgatttttccatgcgtcttgagttaaagcgttaccctttgctacctgggctctacgatttcacctgttctctggccacaccttggaattcacttctttgtgctctccaatatttgatttccttcttgtcttcttttctttgttgttgttttttgtttttgatacaagagtctcactctgtcacccacgctggagtgcagtggtgtgatgttggctcattgcaaccttcgcctcccgggttcaagcgattttcctgcctcagcctcctgagtggctgggattacaggtgtgcgccaccacgcccggctaatttttgtatttttagtagagatggaatttcaccatgttggccaggcaggtctccaacttctggccccaagccatctgcccacctcagcctcccaaagtgctgggattacaggcagcatggccaccatgcccggctttccttcttgccttttcttaagagtcctgcttcaaggaaacttccgtctccttttcaaaaactatttcagtaacaatcccttggtgtttatttaccatttgtagcttaaacttaaaactttttccctgtattagttatttttcaaatatactttttgtctcttcaactaaattttgagctcaggattcataatttatttgaagaggtacaaacagaaaggttctgtcccatatttctaagtagtaggatttatttttccttctattgaaatgaaaatataaatggcctttgaggctccaggagagcccacaaaattttatttagtccaaaataccgtaaaacttcagtattattaatacttaaagatggtttgcctcaagcaagaaatatgaagctctggggaacacattctgtgtgtgtgacacatccagacagtgtggtttgccaaatggtagctgatccagagtgaggttcttaaccttcatcaagtcagggactgctttgaaaatccaatgcaagctgtagactgtcttcccagaaaaatgcgtatagctaaatacatgaggaaaattctgcagtccttagtctgtgtatgtagcatgtgtgtaggtatgatattggtaaatccaaaagaaaaaatgctttttagttaccttttgtagccattaacgttacctgtgctaagtgctcattaggcatttgctggctgattctattcatgtgagggccacagggaccaggagaggtgagagcaaagatgcatgcacagatcagagaagggttaaatggggaattatgcagcatgtaacttatacatttcctgaaaatgatgcttctgtggacttagacaaaaatgagtggccaggagaggattgccgttggatagatgaagtctagatttatccagagttggtatttcttgttaaagaacctcagtgagcagtaagttcataaacctactggggtgctggtggagggggagatctactgtttattttaggatgttttcagctgcaacaaaagaaaaccctgactcaaatggacttaaacatagggaaatgtcttacattacgttacctattccaaaatctctggtggtttccttcctccgtgtactgccttcatcctaggaatgataaggaaattcctgctttggttctgggcatcacatccaaacagaaaaatcatcaaagaggataagtggtcgtctactgatgtgtctctttccttggagtagggagatatttccaagaacccagtagaggctgcacctttgtgtcttagtgctcattttgaaaccagtatctggcctggggaaggcaaggggtgtgattggctgtaggacttgggggtttccctctggaactggaaatgaggtcacctgttcctgatccactaggaggagtggtggctatgtgaacaaatagcaattataccaaaaactgctgcacgttctactaagaaggaagaagagaaaaatagatattggaccaacagaactaacagtgtcattgtatcttctgataaactcacattctgaataaaaaaggaagtcatgtttgtatttttaaaatttatctaaatctgttgttattttctctaccacaacacatggggtacagtcatatgcttaagtccatgtgagtgagcttttataatagatgttctgtccacacaaggactggtttccaaggcccgcactcagtttacttatgggccccactgccatgcacaattaagaaaaagacgagattttagcaacttggactgaactatagactttgcctaaactcattatttacagcagcacttttcttcataggtgaattgttaataggtttgattacttattcttgccttggagaattttcaggtatggcttacaaagtgatatgaattgtcatctctcaaatgcatctttaatttaaacatattctctatgtttctgggtagaggaagaggaaaaaagtctatgaaaatgaatttaaaatgcttctcagagtcagtattaatttaaaccgttgcggttttctgtggggcatatttaacccaaaagaaaagcccttataattaggaaattgggattctgaataattaatttgaaagaggaaatataactttttctacagagaacatctttcatccaaatttggagttccagtttctgcagatgtcacttctctctcataacataagaaaataggtaagaggcagtttggaaagaggttgaaaggagaaattataggttctcctcccagcttttccaataacttgccttgaggacttggaccaagccctgactttctctgatgtataaagttgtaaaggaagatgaaatactgtgcacgaaagtgctttgaaaaattgaaagcagtaaactgctctaggatatttattgttagtgtggtggttctggttattataaatgaagcagaactttaaatattaatggtactcttgttcatcaatggggaagttataggggaaaggttttccaaaaaatgctgagctataactgccatccaagtaagtgacgcagaatgcctaacccaatttgtatcttgctatcacctgatcacagaaagctgtttcactgtagaggtaacagttgttttctcctctgtcctgaggccaatgattatataatatgtatcaaatcactagggtgcatatcaaagtgagcataaagaggcaaatatttccctttacaatgaccatataagagattatttctgtcaggggataaggcatacatgaagtctgactgtttcactgcatttttactatagaaatcactgagcttgagacttgtacattaactccatctggtcatgtgactggcaagtgaagtgtttcaatgtgttaagaggactgatctgcatatttcttgctgaatcttaatctgtacttgcatatttgtgaaacgaatgagtatttaaattatggagaaaagatgtattgtgccaaactaacctttatagcatacctgtggttgtagtttctctagctaacagtggacaagatgaaaactcattatacattttcatcatgttaggtattcttctcaaagtcacaggagcactgcagaatggttcgtaactttatgaattcagctggcattttggatatatggacggcccctttgaggggctaaagacacagccatccatttcaccaagagtcgccgagggtgccttattgcccctaccccgtgctgggtactgagggtgggatagaaggcaaaccagacacatcccttgtgtttatgcagctttttcttcagtgggcaagacattacttgagaatcctaaaaatataaaattacgtctatgacaagtccaatgaaggagaaggacaagacacttgattgaggaggacatttattgctagtcaggggggacaaggaaagctgacccaaggaaatgatgattcagctgagttgatagaggagtgaaatagtcatagtaggaaagtggagtggtgggagttgggaggaaagtactgtatttgaagaaccacgtgttcaagttctgcagcagaagggccaatgaagtacttgagtgttgtcaaaggcaatcaaggtaactggaagagagaacacgagggcgtgagggtatgttatcaggatgaccttgatgttcacaattaagaaagttgctctaatcctgacatcaataggaagactgaagtatctgaaggagggagtttgcatgtctgttcacaaagacctcttaagcaatacactgtacactattaatatgccagtggttcttggggcgctgtctccaacctgtggttgtctcactactgtatactctactccttccccagtgtgtgctatctgtgtgatttgtgtgggatcactacatccctggtggactactgtgactggactaaaacaatcaaggtaatcctatccctctcatcacggtgattaattcgggtcatccaggcctaagcaaatccatgcatggtattttttggctttagggattgttccatgatggtcccaatcaggacaaagttcagcaggaattttgctcttttatagactgaacttgctgccattgaaagtcaatgaggaagcaagtagatctggaatcctatgaccatgagagaagcctgctttagggtgaagttgacatggaagtgtcagaggtgaggggtacaaagaaccattttgtccttgctaatatagtagatccactgtatctcagattgcacctgatacctgttgaagttttcaggcttttctcacccctaggcccttctccaatcctgatgctagctgttgacaacagtcattattaaataaatatcagaaacctcatctgaattcaaggaatctcccagctctttctaaacccatacttgctcattgtaactgtagctcaggccaagatggaatagactaccttggtgaggacaggtgtatgaagaatcactgatttaaagattgttcataacgtatcgcagtcattaggcataagtctatttcttgagacattgtaagggattattcttggaaggacataggtccaaaatgttgaattggacgtctaggagtcagggtggtaaaaatgaagtatatattgattaagtggagagttacatgagtagagaagcaaaatgaagccgagtagaaaattaaaggttttgggaggagtactgcctgaatttagatgtttttaaagtacagctttctgtcttcatgggaatatcttttcgatatactgagaaaaagaaatccaggtgttcttcacttttgtaagcatcctggtttttcgtgcagggagcacagacaacaggatttcttgccaatcagttaccattgtgaggcctgatttttcatctgtaaaatgaggataatacagtctacctgagtaatggctgtgaaagttaaatgaagcaatttgagtacaaatacctcacaatgaatgattgttttcattgatgtggtggtaaatgtttaataacctctttttcaaagaataaaagccgttattggtcatttttgccaatttccatggtgtaaatacttccaacattgtgccagttccgagttaccagtgtgttacaaaattgaaatggagttagagaaatacacatataatgccggagagctcaccaggatgccactgctttctttccttctttccaaattacatacatcccagattttttttttttttttttttttttttgagatggagtcttgctctgttgcccaggttggagtgcagtggcacagtcttggctcactgcagcctccgccttccatgttcaagtgattctcctgcctcagcctcccaagtagctaggattacaggtgcctgccaccacgcccagcaattttttgtatttttagtagagacagagttttaccatattgcctaggctggtctcaaactcctggcctcaagtgatacaccctcctcagcctcccgaagtgttgggattacaggcgtgagccactgcacccggcccataagccaccacgcctggcctatgccagattttgtacaaagtaaaatcaatccttgtcccccaccactgtgatactagggtttgtttgattttagtgacatctgtattagggttgacacagaattaataactgaatcaataaagagaccgggaacagggccacgccttacacaaggtgacatgaaaaatgttgaggtgtagcagtttattcccttaggttaatcatgaacctttctgttaggcccctttgaaatttagtatcactctgtcctaaatcaccagtaccttgcaagtgttgattctagcccatataactcacctttctcaaaaattctgctatgtttgttttagtaaccaaatactgtattttattttcgtaagattttcttcccaatctagattatatatttcagagagaaagcgtcctattttatgtacattttgtatccttttggtgtcaaatatcatgctatgaccataacagtaagtgtaatacacataatatcctccccccgcccccccgcttttttttttttttttttttggagttcctactgtgttccaggttccatggtaacattttccttgttatctgtaatcatcacaacagtactggagggtaaatacggtcattcccattttacagatgaggatacattcaatgtgagatgttaaagatgttcttcagaatttcccaggtagcaggcagctcatggtattcaaaaggtaatggttaagagaaagaatggataatgaatatcttgtgtctattttcttgagacagacgagactgagcagcctgagaacatttggtgctcagagggaggaaatgctaagaggggaaaacaagtctgaaagggaaagaaggatagttcaaagaccagtttcccctgcttcagaattctgactggtgccagctctaactgcgtatgtttgctttacttggaagatagaatcatagtgccagaattcacggaagtctgttttggaagatgcattagtcagggtatgctaattgctggaacaaacaatccccaaacttcagtagcttaacactgcagagggttattaccctccggtgtcacagagcaacgtgggtgggctctggtcctagcctggcttcttccatggctcaggtctgctatcccctaggaccttggagttcactagatattggcatcaggctgatcaaagaggaaaaggagagtggtgcatagacgattacatgggaaattttaagggccaggtctggacaaggcaagtattacttctgctcacattttattggccaaatcctagtcatatgatcccatgactgcaaaggaagatggggaatttcagattcctaggtggtcacgggcagaaagagatggggattggtgaaaacatagcctggctttagccacagagggttacaccagaggcctgcaagtttggtgaccactagttttcagaggtattgggtatttgataaaatccagtgtcttccagaggttgagcatgagccacatataaataactttcccagtgacgggccatcagcagtccaatgaagacattgggtcttcatgtcttcattggactgctgatggcctgtcattggggaagttatttaccttctctgaggagaaaataataacttgcatttcagagtggtttgggacactaaaggaaatcagaagatggaactgatttgttaactagaaatggacataagtattggttacaggtttaaaatgaaacttgcaatgtttgaggaagaaagggaaaatgttaatgcaaaaacaaaaaaggtaaagaaatggtgggaagtagattattggcactttttctttggaaacccattgccatatttcatgtaattaaacttcattccttttaatgaaacaattcttctaaataatacagagatttcccaccaatataatatttaacatttataattttcaccttaaagtttgaacatttttaattttaaaactgtttgttgcagtttaaatctccttatgccacagaactgtggactttctctggttgcaaaattctttacagtgtcttgaattgaaaagggcttaagtaaaaaaagctgggggaagtgggggccttttacaaacaaattacaactcatttggtacaataaggataattcattttgtcttgttttgcatggctgtatattgttttgaattcattctgcatttcggaagcttgcagtatttcttttctgtaggtttcttacttgtaactgcagatttcgcggtttcttttgtgtaccacttgcctcccagaatttggcccaacagttttgagtagctgaacaatttatcggggacagatcagctgaaatgtggctcaacttgagtaaagcagaaggaatgacataaggttaggtgactgatgtgtgagtttttgaatttgatttggttttacatggaaaggttgaagcaatgatccatgtattctaataaaaatcatcagtacaaatcaaataaaatctggcttagtggctattttcccactgtatcactcatggctagcctgtgctgttacagaccacatttggcaggcacggctttttcctacaacaaatcttaaagtaacattgcaatctttgctgtgttaaaaaggcatcttttctaatcaaactgtctgctaatctcatcagataaatcattattctctactgacagctccggctttcccggaaccccttccctgcttcttgttttctctcaagatgtctggttatcgtcattcttcaggtctttgcctctatctcctttcacactaatgacatatcttccattcctgaggaagagttacagctttttaccattccacttactgaattggtaagaccagtacctcagagcagctcatctctttctgaccggtattccactagttatcagatgggcaaaaggcaggatgcatccaagttgcagacctactagaaccaaaaatgcctattcccaggaatttgatgtgattaaacctaagaaatcatcagttgatgcgttctcatctctttcagctggactagtaaagtaaggcagatgtattttcactacttcagtagtgaacatgttttatagaacctgaaagtgaaagtaagggaagcagcatggtttagaggaaaccttggtccatttttccgtcatagacctgtcctgctagcaaagtcctgggcgtttcttaaactgatggcaactgcgtgtgccctggtggtgaaatggtgttgcagtatgcctgggcactgccctgtgaaaaaggacacacagaggggagactcacagttttgttttcattgctgacatggtttaaaaatgtacgttgctagctgtgaaaactcagtcattataacaccgtacacctttcttctttcagcaagtattccttgtgaacattagcaagtattctattctctgttagaattaaacaggtaatcgtaatagcatgaaagggtgaaagtatgtcttatgcaaaatagcctcttttatatagggcatctaccaattttcttgtgatttttgttttttcctcttttgaaaaatgattttagtctgctcgtgtttaggtaggtaacttctcttgatcccaattttatactttaaatgatcccagatattgcattttaaatgagatgagtatataaaaaataggaagcagaaagcataattaaaaattgtggttacattatcgtgagaccaaatgaccagtcagactcctctgaccaatttcatagaaaataaggaggtatcatttgaacaagttgtaacatatgggaactgttttaaacaccatcattgatatcaagaaactattaggaaatgcaagtttgtgtatcgtgtgtgtgtgtatgctgattttacacacacaggcacatgcacacacatgcacacacacatttataagcccaagtaagagaaacctttgccaatgtctgccaggcatttggctgaagtggaattgtgaggaacattttctcagcctttataaatcacagttgaaatatgtcagcactgttcagtttataaaatgacaagggctgtaggctgggcatggtggctcacgcctataatcccagcattttgggaggctgaggtgggaggattgcctgagcccaggagtcggagatcaacctgagcaacatagtgagaccctgtctctacaaaaaattcactgggtgtggtggtgtgtgcctgtggtcccagctactcaggagggtgaggtgggaggattgcttgagtctgggaggttgaggttgcagcgagccctgatcgcaccactgcactacatataccctagatgaagagcaggaccccatctcaaaaaaaaacaaaaacaaaaaacaaaaaacaaaaaaacaacgagggcttcatctaaaggttaaagggactgtttctaccttatattgattataacaagttaactcactcaatattgtatggtatgcttatgctgtattgaatggcaaagttcctctcacagtcttttttggggtcacccttcactcttcactttgtgaggtggctagttcatttgtatacctgctctctaaatgtgggaatatattcttttaaaagtggcaactcaacttatctcccccttctaaaatattttagatgtttccaatttttttttttgtacgtcagcccatggaaaccacactaaatttttctgtgtcatgagtatgcttgtctctgcatttgaatttaattgggaagtgcctctgaaatggcaggtctcctttttacacagtggtttacagaatgtggtgggaggaggcaccaaatagcctgttaggatagcatggctccaaaactgattctttaacttgcctttatacattgcattaattcacaagtggatcagtccatcttgtcttcatcttggccaaattccttcaaaattaatagtaaaatatgcctaaatatattcttgttcctgccctccccactcccacctaggtcacagggctacaactaatcattgtctccattgaaatgtcactagatgatcaacgattgaagaatatttcttaccaattcaaatagaacagaaacttcagtcaagtttagcatttattgccctacatttctgcggctgtcaaaaccagttgatcagagacgtgaagatatgtaaggaaataggaagctgtgatgggttatcgcttgtctaagagtggtacaagtgagacttgagggcattatcactttttaccttatacatttttgtattttaatttttttcaataagcacatacttaaaaattagtttgaatgttcttaacgaatctttccataggttactgattagttcaacagggacaaattataatcatacattgcagaatttgcatgccactttgaccaggtgatcaaaattggcatagcacatgaggggcagaccaacatgccatcaaggggctctggaagtgatgtcctgggaaggacaccagaccactattgtagtattatatccactggaatataatcatgaggaagcatctgatcctcccaaattgagaaacatttccataaaataactggcctgtattcttccaaaattctaatatcacagaaggaaaaggctgaggaattatgtctgattcaaatggataaaagagatagacaattcagtgcagtgcatgatcctggactttgtcttctaccggagagggaggaagttccctattggaatatggattatggattggatctaagtacccacagtatattttctgattttgataatagtactgtttttgttcttaggaagtgcacacagaagtactaaggtgcaaaaggatataattgatgcaacttacacatggttcagaagcaacatattatataattataactgcactgtaattgaaaacttttaaaattagcctggtgtggcagtcccagctacttgggaggctgaattgggaggatctcctaagcctaggaggttgcggctgtggtgagctgtgtttgtgccactggactccagcctgtgtgacagaacgagaccctgtctcaaaaacaaacaaacaaaacaaacaaaaaccccaaaacttaaaaaaaataaaaatgtaaaatatgggaagaatgaaaaaattatacattttccttgacttcaacccttgatcttttcttgatcagttcccaggtggggttaggatatctgtgttttttatgaggttccttggagtatttgggtggtcagccaccatttggagatcaccatgtagtgcctagattataaattatccttttagaaagagttgctggaatcatttcaagattggtcaggtaccaataaataagtaatagaaacaccctcaaaattggaattgaaagagtggaaatttattttatttagtttggggatatgaacatggtataatattgtcgcattttttctggagtttagatgaataagagcagcctacagttgaccggatgacttaatatttttttcgtaccacaaaaattaaatgctttactaaaactttcattctcttacaattctgatgaacaaggttgtactgtatggttaagtatcacactgtaaatttaggcaatacatgtcctattgagcccatggagtaaaatagattttcccgtgatccaagctattacaatttcagatgtgtaaagtatttcaaattcattttaatagactgcttcccttcaaatacatgtggaggtagatttatacaactgtaaacagtttatgcatttttacagattttcattatatgtgtttgatactaatttacctctttttaattgtaggagagataaagaattagtagtttaaaacagtaggaactgcgtgttctgctgtgatcaaggaattagataatctggcttgtttgcttaaggggtctgtatcttgagacttttatagggcagtattaaagctctgagcctccttattatgccagtacccagaagattgctttaatgagaagtaaagggcctttttccaattacaagggaataactgcattaagttcctgtgttatgtcaacctgctttgatttgattactatgaaagaaatggatttatctgtcagtgttacttaattaagccttctcattgatgttttgcagagtaatatagtgtggtttgcacatttgagcctaagtacagagaaaattggcctaaaactaagacatgacccctgaagataacatgcaagattgatcatttgtcattgccaggtcataggctgcagtgttaaacataggtggaaggattgccatgttgaaagggtaaaatgaaaatcagtttatgggagtgagtattttaagcaaaaggggttgtggtggaaaactggattttagggaggagttttgaatatgtaaaactattgacttcaccaatattagtcaagcatctggaataggaaatgacaataaaacaaacaggagaagtagattttgttaaagtataaaaggaaatagaagaaaaaggagaaagcaagaggaaagaatgccgtttgggagaagtagaccattgtggttaggcagagcaattacagcctacagatatttcaattaagccagcctccccttctcagaacctcacaaatggcaccctcgggagaaaagaggtatcaggaaagaaaagaagaaaagaggaaacagttccatgtttcatgttggctaacctctcccaagaataaattcaataaattatttaccaaataggcattttaaataccagtttgtatatctgaagtcattacaatattatggattttgcactataaatattacatgtatggtttgaaaaatacacacgtaattacatgtagacattatcagaggtatatattcagttttattaggaaatgaagcatattcttaaatgtattccttagttgtttaacactttgttttctaaagtatctaccttttatttcttgcactctgtgatatatctttagaaggtgatatgtctttaggaggtgccaaacacctacttaaaaacttccttgcaatattttcacatttatttaagtactttgaaacttatctgtgtaatgttgaagttagatggtactttgatttttttttcaaagtcttcagatatggtaacttacttccaattgttattctcacgcaattcacaatgtttactctccaagaaaactgtcttagttaagactgatttttaagtgcttttagattggtcacatttcgaaaagtcaaagaaggtatatatagttcacgttatactcttgcttgagttattcatggctcttatttgtaggatattgctttaaaaggtaggatccccaaacgactaacttctcttcaagaggaagaccccagctagccagtcccatacacttgaaaggttgctaaatggcactcatctctcagcatttcacattatatattcaagctagggtataattcaagttagatgatcgttgacacctccaaatatataaattaatataaaggcttcaatgtacgtttggttcagttgcataatgtaactgtttaccaccttgagcttcaaaaagatttctgagtttcaatataaggaacaccactgacatatttgtaacataacagttacccacttcattttgttactttctcattatctgaattttatgttataggaagatgctttccctgtttatgacagcacacaatggaattaactccatatcttaagcagcagaaatgtagtgttcatttttgaaaaacaggttattttgaacttaaggaaaataatactgttttaaaggacttattaatggaagtttaagttggatgttaattaaggctaaaatattgcagtaattgtctgcgaacacttttttcctactatactttctcaccagcatatctaccctttaacttttcttatcatatgaaaaatactctaagatgatctcatgcttgacctttgagtttcagatttatttggttaggaaatccattagctctgagaaagccagggttgacagcagtcatctgaaaatggaaagcccaggtctgtattctttatatttgacttatcttttttttttttttttgagacagagtcttgctcagtcaccgaggctggagtgcagtggcacaatcttggatcactgcagcctccatcttctgggttcatgtgattctagtgcctcagcctcttgagtagctgggactacaagtgtgcaccaccatgcccagctaatttttgtgtttttagtagagatgggttttaccatgttgcccaggctgatctcgaactcttggcctcactttttctagtctgatagttttgattgctgtccacataagcaaagtagagctttgagtaatcaaatcataatccacctgcctcggcttcccaaagtgctgggattataggcgtgagccatcgcacctggcctgacacatcttaacatttgtgtgggaagcattgacacaaccctcatcctttgcttagtcagatttgggaagtgctggaagcttcttgtcgagtttcttgttagtgcccagatcactcattctgaagcaccatttcttatgtctaatagaaaacagaaacaatcatgcttgtgtggacatcatctgtcaatatttgaatctcctcaactcttcctatgtctgtaatagtactcaaatttgacttcaaattactctacttagagctcttattatactgggtgctaatgaaaatgtgcacatccttaacacgctctttgctgatgaaatattttgaactctaaattcatctggcactgacggagagcatatgccatctcagtttgtgtgagggctcagccaagggttcttcctggactaggaaattagtaggagccacagatgtacgcagtctgtgagtctccataatggtgtagaggatatttaatagtgtctgttgttgcaggaagaaggttttgaggcagtgtagacttcattgtgtttcagaatgattatctttcctggaagaacttgacatcctatctctgaacgcattctgaatgtgttgaaatttttattaagaaatcaatatatttccacaagagcaggaatctgtagacttagagcaatgcaaaataccatttcaggcatttttctaatttcataaaactctagggtcctgggtgattggcatgttgtaggctcagagtatagaaaggacaactacacagctctacgtcaaatcaatctaggtaactttcatacttgtttatttcaaatcaagctgaaagttacatggtatttagtctgtgttcttagcttgggactctgatcagcatacataacttctgacaacatgtcatttgtgtattacacatagaagtacactgagatataaagagaatactctaatggtaaactaagccactgaataaatctaatgcttactgaattcttactctgatagtgttatacagggtcacggagaaggtaggattgtttaacctaaacgttttgggtgtttctaagatccaggagagtatttaaaaatcactgacctgtttagcagaacaaggagtcataaaaatgtaaggctcagattttcttagatattggagggtattattaaattaggcactcatgataaatactggtgactatggtagatatttactacggatcaagtactttcctaagtgtttaacaaatgttagttaattcatttactttaacaataactccttaatcttgcaaatactatcatccccttatcttctgttagaatactgactttggggtatgtcttgggttttcacttctgttctccttgactcaagaggccattacattttcaaggctgacagatgtccccagggcaaaaaatgtgttttcttcttccctgggttccagccttcactttgattttggctccctgattccttgttatcttgtctgctcagtattttaaaatttttcaaaaaactgttatccatcatttttagttttctgtgggagagttgtccaaatatactagcctgccctatttccaagaatggaaatcaaacttgcttatttcgtagttcacaaaaatgagtacggagaggccagtgacttgctcagaccagagaactggtcactgcagagtccctgctgaaatccagctctttatcccaactcccagtgctgtgttttctaaagtttgtctagtctgtctgatagttttgatcttgctgaccacaagagcaaagtggagctttgagtaatcggattacaagtgtaatgaatgtggatgggaaatcgcagaaggtaagaattatgtctgaacatctttcccctaaatagagtgtttggtcatagttctgcccaaactgttgtgttttggcactgatctgtcaaatactttatttattatttttttttttgagacagtctcgctctgtcacccaggctggagtacagtggctcgatcttggctcgcggcaacctccacctcctgggttcaagcagttctcctgcctcagcctcctgagtagctgggattacaggcgtccaccaccaggcccagctaatttttgtatgttcagtagagatggggtctcaccattttggccaggctggcttcaaactcctgacctcagctgatctgcccgcctcggcatctcaaagtgctgggattacaggcatgagccattgcacccgaccaatgtgtcagacactgtagaggggactcatgcagaatgaatcaaataagatgaaaatttgtggattttcagattgcctcctaaagcagccagcaatcccatggaagagttactaaatctatcttggtttagggtaaaataagaaattagaaaaatcttgaactgagcccatttcagtcttttggaacaggaatttctatcatctacttgctttcttcctttctttttgcccggggtaatatctttctctttattctcccatcttggaaaaagggtggcaatagaacaaggggggggggggcgagaactaaatagattcagcagcttcatcccaggcagtttttcatttgtcactatgttgccttaatggatttcacacatctatttcctgtatattgtttagtctcacctctagatgtaaacacttctcataccacaatattatcttacttttcactttctgctgttttaactcatttcaataaagaactaatgagcccaccattgtacagtaccacacaagatgttatttgtgtcaagtatgtttctttcctataataaacgtacatcacagttgggtatgatataagtatatagctctatagctgtatatatattcacatggttatttggataataaattctgtgtacttgctgaactatcgtattgagccagccatacaagttttatcattgtgcctactgttgatactatgggctgctatgggatattctgtcctctgtgttgggagctcacagatattttctgtctggcttaataccaggattaggtatgcttctcctggacactttgtgtgtttttatctgatggttattgtcaatcttgtttccctctctgctttgtctacttaatagcttctaaagttttgacccacttctagcaaatagccagtccttcactgtgtgcattttgataaactcatcatacctctggccttactgttctgctacttttattttgcagtcacttgggtccttcaaatattgatttcgtatattttgtgttgtatgtgtttctgtaatcttttgtggacacaagagttgggtataaactcccaaataaatatattcactctgcgtggggagaagtgacaggagggaacgttcagctggttagacagagatgtgacattcttactggggagtctttacagcagtgggcagagcttcagcctccttttgtgtccaagctctgccatttcctgatcccttgggcaagttttctaacccatctgagcctcagttcagatatataaaaccagaatactagtaaggcatttgagagtttagcgcagtgtctgacatacattcaagctcaccacatgtgagctgttactctttctttgagaggtgaggaacagtttaggcagaaggaatagcagttacaaaaacatggtggtataaaagaccgtgcagtgtcctggtaccctagcaggagtaaggaatggccaggtgtaggccctgtgcaaggtttacatgaaaatgagtctggacaagaacttcttggatgctcatgtgatggaggtgtatagtgaatgctgctgaaaccagcaacccagacagcaattttaagatatggagtgagagaggctgctgttggtggtgtggggcatgcatttgtcttgtgttacagtggagtagtcctgtggttctcaaactcctgtgtgcataaaagttacctggggacctgttaaaaacagttttctcagccccacccccagagtttcagactgagtagatatgagacggaccctaataagccaatttaaaaatgggcatacaggtgattcaggtggcggatacactttgaaatgcacttggtggtgcactggaatagttattgaggaaatgctaactaaggggcaggcctgacaaagttcaaggagagggaagatggaagaaaatgacttcaaagtaacatgtttacattcattatgaattaccattgcgcatgctatggaaacactagtttatagtgtcttctatggatatggataaatgagcaccggtcctatagatttttttcaaaggtaaaatataattagaattcatatgattattctatttattaggtttgggagagctagtgatttgtcctcatccttgagatccagcaggagaccaagggaaggggaagcctgttcaacagagagcaatcaaagaaagaaaggtgcagcagcgtgaggtcaggaagtgggaaagatggaaatgggaaagggtggaaaaagagcagtcagatccgattggtcaggaatctatttgtgaaggaacccagccagtatttaacctgctttgaaaaagctagacttccagcatttttaattagtggattgctcgcttttgaaattgcccagttgggaatactcaagtgttgatgtgttttatctgcctgctaattagcaggctgcttggttgaccattacttttccttttttctgtggacagaagatgtatatgaaggtctcttggtacattccagctcaagtctagcttaaagtgcataagaaaaactgtgtatttaataagagttcttactaaattataaatcaaattttaatacatcttttctccaacttgattccttttgctctagcacagggcttctcaatctcaacacaatttttatttggggtcagaacaccaaaaatatatatatatatttttagggacagggtctcactcagttgcctaggttggagtgcagtggcacaatcgtagttcactgtaaccttgaactcctgggctcaagggatcttcctgcctcggcccctccaattagctaggactacaggcaagttccaccacacttggctaattttaaaaatttttgtagcgacagaatcttgccgtgtttcccaggctggtctcaaactcctggcctcaagcaatccttctgcttcagcctcccaacgtgctggtatcacaggtgtgagctgctgtgccctgcacagggtatttcttactgtggagagctgttttgtgcaattatgagatatttaatagcaactcttggcctctgtgtgatcaatgccactagcaacacccaaattgtgacaaccaaaactgtctcctgggtggctttgccaaatgtcctttgggatgcaaaagccccactgacctggcagtagcgtcctctttcctccaagtctctgcctacttttcatgtttaaaatcctcttttaaaattgaaaagataaaatgagtccaaacaatttgaaatcttatggtacttatagggattcaaatctgttcctccattactttttggccaaattcaagaggagaaatctctcaaatgaatccaagctggctgttataggtgaaaagaaagtcaagatgcgccagacttttaaaagcttgcagtggttgagagattttgttatttatacactttttattttggctgaaaatatttggtttttgtttaagaattaagagaaccgtgtaggctacaaaatttatttatgtgcgaatcccagagggttgtaagtagcttctttgtgtgcttcagttcaacatatacaggataggccagcatgttggattgttaaacagcagatctggggaaggttttacaccttttctctaggcttggtgcagtcccgagagctttcttgacatgccttgaagctcacagtgcactgatttaaactgtccataggggacatctgtttgcagtttgtgttatctgctgaagcaccaactaaaaggaagtgaaataatatttgtcattaaaaaaaaaaagagaagttaatttaatggtaataacttagttgttgttgcttttctatctcttaagatattctgaaacaccatgtactctactgtatcccaaaataaataaattaattatactatgattacttctgctgataataaaatagcagtaataataaaaggaatgacagtagagcattaagagaataaacagtatcactgaaatgtgaggaaacacaataaatgggattgtgtctcctgaaccttagtttcacacttcctcctccacttctgtcagagggtgtttgtgatggccgtctgttatcagccgtgatcaaaataatataacagtgaaactttttatacttatgaaggccctttcatcaaaaatctcacagccatttctaaatatagagcaactgatctttaaaacacttttatgttttaagcaattaatatggtaacttagctgttagactttccatcctgcgtatttgccatttggagcgtggatggaacatttcgtaatctactcagcattaaaactttgctggtattgagtttagaattccaacttttcgatggttcatgtaggtcttttcactgtcatctatcaaaacaaaacattgctttataatggaataaccacattcatttccacatatcaaaacccagattaaggattatagaccaaatggtatgtctagtttaaaaaaaaaaggaaagacagagacagtattgtcttaacctaaaaaaaagttttgtttcagtcctaatatccctgtaatgtgctggtggaaatagactactgaatactttctcagtctcattttctgttgcatgtctggtgtcttctgtgataagcctgggctatggaacaaaaaggatccaagagcattatggcgaggatgctaaaggtgttagtgtggatatttaccttaatttaactttttttgcattaaagttatgttagtgcatttttaaacttattttatccaaaagattgtaataaaactttaagtacagtttcacatctataaagactgaggctatcaaacactgtgaaggatggaagtaatttttatgtttatacctctggttcctgagggtccagttcatttctactgtgaatttaaatgagttaatttaagtagatgggtcagaagccactatcatcatggtagcccggtgcctggttcttaattaaaggcaacaggagattaatttgaaacattaatttgaaagtgcatatacaaaaagaaaaaattactgcaagaaagcctaaagaacttttctcttgtccctagatgtagaagacagaagtagctcagggtcctgggggaatggaggacatccaagcccgtccagggtaagtatatctaatcttttctcccacaaccagacatcccacatatgtaaattgacaaacagaaggtgtgtttctctctctctctctctctctctctcacacacacacacacacacacacacacacagaggcatgggcatgcacacgcacacaaacacacacgcatatatgtgcatactaagtttaatgaggatcagcttgactttggaatttttttcccccattctcttattggatgctgttattcaatttgacacctgttccacttctgctaaccagaagaaaattccttcgttacatgtttggtctttcttttgtcagttattgatccatattacataatgctgtttgttgtagatggaaaaacttaaaaaaattcctaatatccctataaggtattggtgtgaatagactactgaataatcccaaagatacactatgaagttctatcctaccagtataatctacgtactgaatctgagttgatttcgctatgtagacatgttatcattccaccagtagggactttgatcactagatggatcattcatttatttgccctcaactttttgctattcttctccacagttttcctacatgcattggttgtttcttggggaagacccaaggaatataatgtaataggaatgtaataggaagaccatggaataagagttgggtgggtggttaagcaatacgtgtttcttgtatgtatatgatcttgggcatgtcatttcacctcttgggtcctcattttcttattttgcaaaatgaggaagtagatccagaggatcatctgtgtttcttccagtttaaatattcatgattttgtatgaaatttctttaactgaatcattgctaggccctctaaaatccatgtcagtttttatgatgtacatacaatgccccagattaaaagtacacttcgtgtacatggtaaaaccagcatgtcttcctttcccaaccagctatatatatatagatgaagcattctgcagggagggtaacattttactgtaagtgttcacacaaatttgggttgggggaaggttccattttggcataagaggcagggaaggtaatcaagctgtcaaaatgagggcatttcagcaagtcagagctagacatttccacctgtccttggcattgtgatccttagtctagtgttcagggtacagcaggatctctaagcttaccagtaactttgtgagcccttacaccagctgtcgagcttgacattctaatgctttatatggatgggttgaggaaatctttcctcctcctcatgttacagtctgcacttgcagaaataaatccattccccttgacagcaagtggagatcatagaactcccctcaattgtttagttcatccagattttcacaatttcttatgatttatccattcagtacacatggtacttttaattgtgtttcagaaaacaaggtctgtttagaatcatcttaatttaggattaaaactaactagcttttggtttttgttagctgtcctgccatttttctcaaggaatatattggtgaataatttcaaaccaattttgtgtaatttatattttctaaatccagaagtttgcatgagacaaatcatttgtggcagatttatacccaggcgtactttcaaggtctctcttttttcatcttaacatggggatagtgtctaccttacagcactgtgctgaggattaaattagataatatatattaagcttttagtacactatctaggatgaggacacttaataagtgataattagcattatgcaatgcctggtatagagtgagtgagtgtactatgatgggtatttaaaatgtagcctctttttatagatggacatgttggcagaattagattacagtatcaggcaagttaattgttatacacgaggaaaggtgattgagaacggggtagttttccttaaggttgaggggatgtgtcttttccttgttcatgcagcagccctctcttttgtgtgggcagattttgccctttggctcacatgcaaccgatacctctgagtaaatttgacttagactttcatgggcagttccaccagctgagcagaatgactttttcccccctttttggtcactttatgcactttagtagactgaaagttgaaccatgtagtatagatgattttaactctttcctattgcgttatcaaatttccccattaaaattaagtaactggacagcttaagaacattgttttaattttaaattccccttaaaacaataagctgattgtaataatgaaatatttctgtcaaaatttgtctgccttacaactggttgttttttgtgacatgctttgtccaactccagaaatgctaatttatgctaatgttttgatgttcatatcctagttaaaccctaatattcttaactttcttatgtgttaattacttatgtgacaatctagttctcttacaaccacaataccacaatagtaactataataaaacattgaaacttcagtatcctaacaccaaatgttattgtttgaatggctctatcttggtctttgaaaagcaattcattgcatgctatgcctaattttcccttgtggcacaattttgctttaatgtggccttattaaaataataatttttaacataagcaatatactttgtatgtgtctggtgtcttacatacactattttatttaatcatgtcaacaactccatgcagttgataccattattattattcctaagatttctcagctattatgaggaaaatttggacttcgtagactctagagctttcttttagccactatacctgtgaaagtgcagattccttctagtgaagttccagggagggaatagtggactccaatttctttggaggggagaagttttggtagtggagctatgtttgtttatgtgctgtttattaatataaaataataacttacactgtcattttatttacagaactatggagatgggactccctatgaccacatgaccagcagggaccttgggtcacatgacaatctctctccaccttttgtcaattccagaatacaaagtaagacccattttaaattaacttacactttttgaatgctcaagttttactatagaaggtaaaaccatgtcctagacagaggttctgcttttagaaacttggatatttagtcagttcacttgtaataatcttaaattgcagagaggattggcagtctgtgtttggtaatagtgcattaaggattaagttttacaagcatatggaatgaaatgcttttagtgatactgaatctatgtggaaattttgttttccttagacctaaagcacggaccacagtttcaatgttgtatcagtagtttcctaagttaaggtagatgaagtcaaagtggtgaatatttagaataaaaatatcactgggcttgttggttggcagtgatatatagtcagtgttaactgtgatttctgctaaaggggttatgaaaataaatggtgttaatgggcttagtgtgcttaaatcagagtagtgcattcaagttgaattgtaaaatctgattgtatatttatcaaggcatgaactttagtgctaatggcctaggcagaccccatcctgctttattaaagcaagttacctgttagtttgaggctgtctgtgaatctccggcatgccattcatcctggcatcctcagcatgtttttctgcttttggctaccctgtagggatgtttgtttaacagcagtaacttgagcaatgaaaagatgattcctaatggcttaaaaggtcccaatagctggctactttagttttgattgaaaaaaaaaaagatctttgttctagtaaacatgagttcttaacaatattagtaaatctctcaacctggccaaattctcttgagaatctgtcaataagtgaagttaaatttcttggtacaatctgttggacaacactccaaggaaacacacacagcgatgattatatttttctgagaccataactgcaaatgcttctaaagaatgtcatgattttaagctttggaagctataccagttacttcaggtccttgaatctcaggcattctttgaaaaatcaccatcaaatccatctaaatggatttcagatatttaacacaaaatagtcaaagcagataaatactagcaacttatttttaatgggtaacatcatatgttcgtgcctttgagtatcttaccaactttgagaaccacaaagttggttttggtcatagaatgttcttatttttgtgctatttttgccttcaaagtagtaaatttcatatttacgttttaacattgtaactcaagcaggaatcccagttctttatcagttgttgatagaaaggtgcattgtttcttgttctcaggatatgtagatacaggtgaccagatatatttatcaacttagattttaaaaggcagcttttgactcttcagtgtcaatagttatgattttatttctaacacccttgcttctctattcatctccacacaaccacttagaataaaagattcacttgaaaatgtagtcttgagaagtagcacctaaataatatactaacttccttggatcctaaaatgatcctccaatgagctacagtaagaaaaatagaataaataaatactcatagggagacgcttatgttatctatgtgaaaaaagttttaactctaaagaacaacttgataaattaatattacagaatacaccaagcagtacaaacagattaaatgattgttctgttcatgtttcctcatgggcaactgctttacaaatcaaattagtttttcaacccaaatagtatttaaaatataagtggcctgacagtctagagcggagagagctgattcttttcacttagttgttgtttaggctgcaaatccatgtcagctttgctcttttatcctgtctgccctccttcccattaaactcttaaatatggagaccaagacagtctcctgcattgtgataggaaatgctactatgtccacgaggcccccacccactgttcccagtgaaaggacttctctgttagataagctgtctggtttgaaacatggctctttattgtttacaaactgctacattttccacctcgagcagatttttgcacagaaaagaattgtgcttgggctaaatggtttatctgacattaacggcgcagtgtcagactggggtcagggaagtcaccctcagagcgagagggtattgcgcggtatgcaaaaaaaatggaaaagggagaaaaagacattgaaacaagtatgaaataccttacatttttagtttagagaagaataatttttttaagagaattgactcttatgctgcattaaaaacttcccatcgctataatttctcacacacccgatgccttcttgattggcttgcgtatctgaaggctagattcggggaacaaagattctcattgattttgcccaagctgctgtttatttaaaatgaaaccacttttcagatgagccatatttggtgttatgttacagctttacaaagaaaagatagatcattttcaagaaattaacgacaattaatttacaaatgataataaaaacaaagtaagatctattggtgtaggggacagtttgaactcatagcatatatgctgtgttctaaaccgcactttgtgtccagacccagagcccatgttgtgacctttgtggatattttccttctaccaaaagaaggtagtagactttagcataagtgtttgacaacactccagtctccactttcagaatgtttaactggtttttgttaaaactacaaagtatttgtttctgtctcaaaggcttaattctgctgtgatgtcgcatcagggtaaaagctatagcatcagaaataaatcagccactttattggagcagattctctattgtcaaatcaatcaagcctgtgactgaattaggcgtctgctacagaaataagtgacactaattttataggaaagagttattaactgcagatgacctgatttttttttttcctttttttggtgaactgttcatttagtaaggttttattttattgcaaagaaagaaaaaagtactggactactctttccttttgagagtggattatcattaattatgtattttgttctttatggcagtatacaattttagggaaatgataacaggcattgctagtatatttgtttataacctctatggtaatgaaacccattattacaactctgaacttcttgatttcacatgaatggttttgcattttacagatttttaaacataatacttctatttggcactgaaattccaaaacttagttcatttgtgtctctatttcacatttatgcaaagtgggatataaattataagagtaataaagtgttttagcctaggcaacatggtgaaacctcatctctaccaaaaatacaaaaacttagccaggcgtggtggcacacttctgtggtcccaactacttgggaggccaaggagggaggatctcttgagctcagggggcggaggttgcagtgggctgacatcatgccattgcaccccaacctgggcaataagtgagatcccatctcaaaaaaaagtaataaaatgtttgttttaatttattcttttagaaataatcttgtgtgtgtggaaaaatgcactatttgatagtttgtgaatccctaaagtaaataaaacacccatgtgtggttatacatgcatgcacacacatgtacacccatacacacaatgtatgtatcatgctagaagacttaatgacgtttcttggtttataagattgttctgtattcctgtctgtggttatagttgtcatacagggttttagtggttgatacttgtaagtgttttaaagaagaacctaactaacagaaacaaaaagcaagctcctaaattttttttaaataggtgtgaatagcctttgtgtttgttttgatgttggcagggttgagagatgtcagtactgactgcctacattgaccaattcatatacttttacctgacatttactaagaactcactcgttgctttcattgtgtagatacatgccaggttgcattttgccttagttgaaattccatgcattgttttatatctggagaaaataaatcatttcttccttgtgactgcctatcattattaatgattataatgtacactggacctattggagacttcttcattgcagtttttaaacaatttgatgaaaccttcctaggtggtccattggatacctttcagagtatgctaatggtagaaagggtcgatgagtctaattcctctgtttttttaagagggttatttatatgctatggaatagtttgagaatcctggcaagaagtgtatggaaagaatatggacattaaaaaaaacttttttttcctttgtcaagcactaaacttttgcaggtaattgtccagatatttttacaatggtagacaatatattttctagctaaaactgtttgctccaaggaaggagctaagcattccattttccttttattattccagagcatcgattgaaagctagattgaggataagtgagcaagttgccccataaaattacatacatgcatttgtgactgaagggtgtgaaaagcgatacttttgtacatttggctacagcttagttcagcatcggggctatgctttcacatggcccattttgaatggttcagtttccttactgtggtatttggttctagtcctactcatggtactctcccagagcattaaataatttaccgccatagggtagctgggttctaacctagctcagcagaacatttttctgctggattagattgaggtttcaggcagaactgaagaaagctgctggcttacaggatgacctttgaatctcatctgggttagcggttgatattttgatttggttactgtggtcatattgtgacagctgctagctcattataattcggttccaccgctccgtttgcctagcaggaatatttaggtttgtattacttcagagtgtttatggctaccctgagtttagcccagcataaaggtgaagtgttgtgagtgttttcaaatcccagtggcagaagcaggtgccacagtcttcttgtaaaacagcaaatgtgagtacatgctaatacagggagttttactcttcattgtaaaacagagaataaccaatgaatcagcttttactaggaaaagtgtttttggaagccttaatgtacaaaggaaaagcatgactacaaagaaacataatttttcaaagcacgaatgagatgttacctgacttcatggttagatattttgttctttgcagaagtgtgagtattagaaaatagtaaaacctgtacaataatggcaatcatttgatgtttgaaagttccaaaggtcaaataatctttagtaacttcataagaacggaactgtgaatatagatgtcagctctagaaattttagttcactttttaaatgcagcgaaattaggtagtgatacaagcaggcccctttgctagttcattagttagggacatcttggtgtgcttcttttttttttttttttttccaataacacctttcagcttgatgttatctcgacatcaactcttaagtgttggacttataatgtggcacaagtaatttctgagaaaggaaattattaattgtggtcttatttgattttactttgggaattttcatttctttaatgttaaatttaaaatgccctcctgaaatattaacaagtatgactcgtttgagcctcatcgctggtgtttttagcaatcttgattgttgagctaaggctggtagtcaggagtcaggagaactcagtttttctttcttctacttcttcctttcttcttctacttctccttcttctttttcttttcttttttttttttttttttttttttgagacagagtctctctctgttgcccagactggagttcagtaggatgatctctgaagcctcaacttcctgggctcaggtgagcctcccaccttagcctgctgagcagctgggacgacaggtgtacaccaccacatctggctaatttttatatttttagtagagatggggttttaccatgttagccaggctggtcttgaactcctgacctgaagtgatctgcctgcttcagtctcccaaagccctgggattacaggcgtgagccaccacgcccagccaagaattgagttttctattctgttttgctacagctgcctgtgggtcctctggtcaggtcgttttcacatctttaggttgagggaggaacagctctttaggtgatctctgagataattttattatctaatggtccattgatctttctgatatgtcattttatccttatactatattttctctttggagatgttttattgttctttctaatccattcatctctattttatgaataccttcaagtgactttgccagtgatgtgttttccaaatgtaattctttaaagcctaactaaaatagatattccttttatatctcagctgattccagatctatagctaaggaattggattggttggggataaataaaataataactcattaagttgagtcaccaggagaaaagttctgtgcatagatcagtatttagcatagaggttgtaggacctcaataaatgactgtcgagtgaatcagggaattagatagatagggtttaaacgttgaatgaaaagcccatacattaaagttaggcctataccttactgtaccaagaagaagaccctaaaccagagccagtcatatagaaattcacattttgttctataggactatatccttgactgggcaaaatattctgccaagataggaaacgggccatattacagtgtggcctgtttcagttttcagtacaccacagattattttatatataagcggaaataagtaaaatcaataatattttgggtcgggcatagtgcctcatgcctgtaatcctagcactttgggaggccaaggtggaaggattgctcgagcccaagtgtttgagaccagcctgggcaacatagcgagatcctgtttctacagataataaaaaaattagctgggtgtggttttatgcactagtggtcccagacattcaggaggctgaggtggaaggactactggaggctgggaggttgaggtcactacagtgagctgtgattgtgccactgcacttgcactccagcctgggtgacagagagagaccccattgctaataataataatacttattactatatttatatttttgtaattatataataataataattactattattattataaataatttgaaaggccattgaaaaaagttgcgtttctggtattgagctaagataactgatttccttttgtccagtcagaggacatttccattcttctctcattggtcttgtttcctttccggcctactctgtgatatagcacagctaatgctgtggtcctcaaacacttttagagtccaactaggtttactaatccaagtcgtataacatttagaagaatttctaaacagaaaaatgttacttgaaaactatggccaacagagatgtatagaccttctaaataccaggggaagatttctcacatagaaagttattgacccaaagagaagataaatcatttaagcttcacataaaagtaaaaagcaatttgtatcaggtaggaatgcttttgcttcgaagtaatggaaaatgtgactaatgatggcttaagaataatttttctcattctagaaatctggtggtaggtccctgctggaagtggtttgcagctcagtgatgtcagggctggtggctctgtgattcttttgtccttcccctcattgtctaaagatgggggtcacagcttcttgtgtcaagttcaggtttgatgcagaaagaaggggaagggtgagttgagtggtgtctccccaccacactgcttccccataacccaggccatctccagctgcagaggttggggcagggctgggaatgcagcctgggaaatagacaggagagaagcaagtttgggactcatactgggcttactaacttgcagtgttcaattcacactttaattttttaaagagaaaaatatataattttctatttaataattttgaaaattaagaacaaggccttaactttcatgtaataaaaatatataaaaagatgtctcagctctaatttctggtcagcaaattagagaggaagatggagtaggaaaaaagatactgtaaagaggaagatggagaaagtacaggcatgagcgtcttgcatgggaaggagcgtgaggtctgctgtttgcatctcaccttcaaggcctgtgtcttcattgtcctaagcccttgagcaaggcagcaaccagccaaagccagctctccttacctttgctttccccaggaccttctcttttaggtctctggcttgactttctgccagcctgtccagggcacccttgtcacgcaacaggcctgtagctccagccaccaaccactcttttctccagtcccctgggtggtctttggcagagccaaaggccaggctttactcccagtgtctcctgctgcacccatccagagcaggcctggcaccctggagcacgtccctgggacatgctgctacaagtgacagacaaagatctttctcctggaccattgcccaaacagtttccagggaacttacctccagcaacctgccatgtcaccatgaaacagtcagacaagaatgcctactgcctaggggagaaaaccctctattttcttttaatatgtacacaattgcagttgttgatttttaatgtggaggattaggtgcagccaaaagacatttagttttagacaacatgccaagactggatgaaatggtgagagctggatccaacttttgtccagaagtttcccaaccctattgaacagtctcatgtcatgaatcagacccattggaacagaggcagggggaaggaccatctatcattaaaggtaaccaggatgtgaaataaacagtgctgcttttatttagtagaaaaagtttttctctaggtttttacatttttatttattttcatgtttttatttacttactttctttttagacacagaatctcactctgtcacccaggctggagtacagtgacatgattatagctcactgcatcttcaaacacctaggctcaagtgatcctcccgctttagcctcccaaagttctgggattacaggtgtgagccactgtgcccagccaattctctaagtctttccttgggaagatggtttctctgaattttgcataagccctatacttaaaatgtgtctgtgacagtattaaccagtaccctacttctggactggatcttgggtggcggggttgcgattaaacactttgtgtttctcaaacctctcattactccatggcttcaggagaataacatcagtatagttagggaatcctgaacctcacatccttgaaacttctgtgtccaccttaagtgctgtattcatcctcaataaaaataagactgctttctttgttcacattatatattcttagaaccaaagaagcaaaggagctgttttgagcagtgcacatcttacagggtgtcatgggacagtggattctaggtcttcaggggtcacttcagcataattcttggcttttcacttcctagtgatgggtgatgggacattgggcaaatttcctcagagcccccgttttctggtttcccaggtgaggacagggatgccagcctggcccacccctcccaggctcactgagaaagatgtggtgatgtgatacactttgtaatcactgtgctctgctgtgtaactgttagggcattgcaaggctaaccactggtcatctgtcattttcgtctgggtaatgaatggaaaaatctatagactttggggttttgggtggtagcaattttaaaatacctataccttctaaagagattggaacagaaggcaggagcaggtggaggtagtatagaatgttcacttctgtaaacatcaagaccaaaatgaaaaggcttcttttttagccagtccacaaaacagtaatcctataaaataagtacctctttggggacagctgtgttggattcagatgctcccttttgtgaaatatttgcctacagccatgtttctctccattttaaatgttctcaagtttcatctttaaacacaaggccaagaacaccctggtgtggtgtttgagtggtgagactagggagaacccactgacaaatgcagatttctttgcctgtgttgtaggtcatctgaataatggagtcactacaaggtaccatggttttcatcaaggagatagttttacaaataccttccatattcttgggaatgttttggagacagtcctattccacttcatttctttcttctccacagatgcttggtatagaatgttgcctctgtatatgggattattctctcattccctttactccacagacgcttggtatagaatgttgcctctgtattggattattctctcattccccttactcttaagagtttttgaatccgaaggaaacatgttttgttttgagtaaaaggaggtgttcagtggatctcattttcttttcttttgcggaatatgaggcctaggaactaacaattgcaaaatatatggagcataggttgagattaaattaaatttatttctaagtggttaatagacacagctcgaacatttttcatcttcttgatgattgcttattaatcactccttaattccttgacacatttattaataggaaaaattgcaaggaagcatcatttgaaagtagtataaaatacagctggttatattgtttatgtttaagataaaacatttaaagctttcacgtaggttgaaaatgccacaagagaactaacatgggggaagtggtggatggtggacctagcagagcactgtggtcagctgggcattgctgtgagcaccagctcaccactctccagttctgtgaccttgggcaagtttctttagcactgtgatgaaatttctcatctaagtagttgccctgtgtttaaaagaaataacgtaaagccacctggccctaaaattcagttaatgcaaattattattacacctactattatgttatctagtctgtttttctgttcattgggtccgatcagcttggcaaaagtgatatgctaacttgagcatcatgtagtgaattctggcagaacgtggaagtgattaattaaatgccaccccctcgtgggccatattaaagctgaatgaaaatagaaagtgtgtaatatctgataacatttggtggagaagggggagacagaaaaattgaaggataagagaaaaggagacacatataaagctaattttagagcgatagatcacaaagtaagattttctagctttgtattatcagcattggcttggctttctgagtctcgaaattactaggttactgactggccgtgccttttcctcaccttggctattcagaccaagctgtactcttaacagctcagtagccaaatctgaatgcttcaaatataagcataaactctttatgtgtaactgattgcacttaattgggcaataccaaatcatggaagaaaatttattagtgaccctgtctccttcagaactttcagagtaattggaaatgagcctaatatccgtgtttttgaaagctttaacaattggtctactgacaggattaaattcatactttatatggtgtgtatgttttttcatgcttaagtttttttccttatttattgatggtcttacaaatattatttggaaattgagatgcagtgagcacagatcttaaatatcttggcagaccgcctcagtagctgtggatgatccctgttagctagagaaaaaccaggaaaaaaaaacccaacctggtacacaatagtttacgaaatgatctttgtgtgattttgaacaagctgtttttcattttaatctcagtttccttgcttctgttactgacctaactcatggagatgtggccaggagagggtgggagagctctctgaatttttttgtttctcctgaaataaaacagttctaaatagacatacttttgtgtgattacattttccatttttcgcaaagtcgtaggtatagtttgaacaccaattgagaataaaagaagctgccttctcccagtcttttcaagacattttaatagttaatgagattttgccccttaccctcatgagtttcatttggttctgaaataaaaatttacggctgttctctcagctgagctgatactagtttaagagtggaattgagttcacacctgctctggcataaaaagcctctatgtgacttctttgaaatattcacagagcagaataagagagagtactcactatctctacaactgtagtaactacacggtaatgttgcttgcaagcactttagagaagctgctctataaactgactctaatctgctgatattgtccacagatagatgcctcccctaagtcacctgtgttcctcaaggtggaatgtggttgtggaaatgcagttggtttgtgtaggcagtgggtctacattaacactgtaaagtgtacatatgggaaaatctttgcatttgctaggccatttagccgttcaagacatggtccgttagtcaggcaacgtacaatggattttctgagtgttctagttaaagagcaggatgtgtaaagtagtatacatttaggcggataattaataattggtgtaggcttgtaaggctgtaatagaatatataaatttcagcacctgttaaagttttatcagagcagatcacctttccttactgtgagggaatattcccgcctgtagaaaaataaagtgctcccactacacgtgaaaaacctttatgatgaaaggaggactggtttttataacaaatattattttccatggtcactgtgattaggtgacattttagcagtcacatttagagagcgttcctagacaatagtattttgtatgggtttgactgtaggtggcaaaacactgcatagaaacaatattttagtgcattctaatattcagatacagtttacttgtcaaagaagccacctccccccccatatcatccccccacaaaacaatagggttgttcattttataagttcatcacaagtaaatattcagagcgaaagccttttctagtggctacgttggaaggggtagagaagatgaaacatagatcccaagttcagtttttggctttggttgtatcataagcagtttttacacttcatatcttagctgtcttcattttcagacatagaggaagtgctcccttacagcagtgagggaaagggcaaatgatatatttgtgaaagcaaagcagactatcttactgctttaaaagtttcattggctgcttgataaataaaattaacatgttatcgatatgtctgcaatcatatggtcctcagtatatgtattttttaaagccatttatataaattccatttattctagaagctgcccaaaatgataaacttcaatactcaaatgagtctttggttcgtacagtcattcacccagcaagtacttttgggaagctggtgatctgcaagccctatgttaggtactagatagtggcatgctacttttcttgctttcaacttggcccacatcctaataaaagaatcaggtagatatcagataattacaattcagagagttggggaaataatccatgtgttcccagggtgttgttgcatacatatcagggatactccaccatcagcttcctcataataatgtctaattttttttttttttttgagacggtctcaccccgtccttcaggctggagtgcaggggtgcttactgcagcttcaaacttctgggcttaagatcttccctccttggcctcctggtggcagggactgtgggcacgtgccaccacacctggctaattttttctatttttattttttgtagagacaaggtctcgctctgttgcacaggctactctggaacctctagcctcaagcagtcatcctgccttagcctcccaaagattacaagtgtgagccactgtgtccagcttggctaagatttttttttctttttttccttttttttttttttttgagacagagtctcgctctgtccccaggctagcatgcagtggcgcgatctccgctcactgctagctccacctcctgggttcacgccattctcctgccttagcctcctgagtatctgggactacaggcatctaccaccacgcccagctaattttttgtgtgtttttagtagagacagggtttcaccgtgttagccaggatggtctccatctcctgacctagtgatccgcctgcctcggcctcccaaagtactgggattacaggcgtgagtcaccgcgcctggcctggctaagatttttgggtactcactgtgtaccaggcacttgctaagtactttacacatattatcctgcttgctccttataataaacttctttgttagacattgtcattaccattttacaaaggaggcaattgagaatcagagagattaggttatttgcccagtgttgtgtagctggtaagtggcagaatccagatttgaagcaagatctgctgaactctaaagccttgtccttacccaccactgcattgcctcctttgtagagaatttagaaagaattcccagaggtggaatagcagctaaacatgggttcagctgcaactaatagaatacctgataacaatggtaggttagtaaaacaaaggggtttttccccttcattttaggaggtgtctggaggcaggaggttgcctgtgtgagttcagcaaatcaatgtttctttcttcccattctgccctccttagcatgctgattttcattcttcagctttttcctctcctcttgcatttctttcttgcaagctggctcttgagcctcacacagcacattagagtcccctaaaggaggcaggggaggcagaggttagggtaacatttatccttacatatatcctattccatccaggaagggggaaaaacattaccagaatctggtggccttgagcaggattctgctaacaacttattggctaaacctctagcagacatctactcatagctgcaagggaagcttggaatgtgaactcttagagccatggttgggtctctgactcaagagacaggcaagggaggagggagttaggaatggctattgtatggatcaacatgaattttcttaataatatacgtggtaatgcctgagcttcatcttaaaggtgagttggttagaactatcctgatggaaagaaaattaccagttggtagagatgcttgagcagagccttgggagctggaagacgtaataggaatactggaactgaagtcattctgtgagatgactatgagatgtagtaccacagaggaagggatgacaggttgatatggcttggctgtgtcccacccaaatctcatcttgaattgtagctctcataatccccacatattgtgggaaggacctggtgggaggcaattgaatcatggggggtgggtttttcccatgctgttcttgtgatagtgaatacatctcacgagatctgatggttttataaaggccagttcgcctgcacatgctatcttgcctcccaccatgtaggacgtgcttttgcttcttcttcgccttccaccatgattgtgaggcttccccagccatgtgaaactatgagttcattaaacccccttttctttataaattataattatttataaattataattaaaatctataaattgtaccatctccggtatttcttcatagcagtataaaaatgctctaatacacaggtgaagctggaatacaatcctggccccagagaaatgaagggtctcttgtgtttaggagtggaagatgtcagattttcaatgaagcgtgtggtaaactactcaaggattgattttaaatagtgagataccatgatatgatttatgatttaggacactcaagcaactgtgaataggaggcaacttgagggcaaggagattactcaggaggtgattaaggcaattccaagaggaaatgatgagattgagctgaactgggaacaatgaagatgaagaggaggatggatttgagtgatattaaaatgatggaaatggttggacttggtaactgatgggcaaggcaggggtcgtccttggcttcttggtgtctggcttgggccacttggtggttggcagtgccatttgttaagatgtagaatatatgaggagaagtaggtcatgggggattaaggtggtcagttcagttttggaaataatgaatttttgacatgtctgtgggtggacagatttgtgattctgggtttgggattgcagatttggcacacaatattaatatttcatagttgaagtcatgggagtagataagttccccagagagagacatgaaccaccaccaacaaggcaatttgttgcattgtgacagctctaacttttagaaagttctcaattctgtagctgtcagcctgaaatactcatttttccctctgaagctaactagtattgtgtattgtctctctttccacatgttttgaaggatgctaatcttggcttccttcaaaagcgcaactggaaaactttcaacacattgtagaacatggtttaatcacaccttgtattcccggtcaccatcctctgctgtgttctagttcatctctttttccctccaagtggtgaatccaagtcttaccctagtattccagatctggtttgatcaatagtggatctgctctcatttttagtgttaatgcagtctaagattccatgtatacattcatattttaacattgactgaaaatggagcttgtggtccactaaaatcattaagtgtttttaacattaattgctttacatccagggcttccacatctttgtgtagaatgggacttaatacgtatcctcgtctgatttcttcatgttggttttggtctgcaaatgtgcaataattctgtcctttcactctgttgatataggaagtgagatggtgtgatgcttaggaatgcaaactcttggatttatatcctggctctgcccaccctttactacctgggtgacatctaagttgctttctctgagtcacagtttcctcatctctgtgttgaagatattataaaatccatctgttgggattgttgggtgaagtaaatgaggtaatgcatgtataatgcatagaggaatccccagaacatcatcaacactcagtaatttttccctgttactattgtagggcatataaggagttaatggcgctatttttgtgattgtggatcctttctctcagtattctttctggaatactttcagtatctctttctggagagaaagtttaaggcaagtggttcatctgtgacgaatggaagaaggaaatgtggttcttgattttgagttgtgtgatgaacccaaatttaccaggcaatagataggatatgatgattactaaatttgccattgactgatagttaactggctaccttgttgggtctcttgagaaaagaactaaaacaagaacaacaacaacaaaagcttaaaattacctgaaaatatgtctctttacctacacctaattttaaggcagaaaattccaaagtgagccagctactcaatacaggtgctgaaggttatgtgaaaattcgggttaacactaatgatagattgagaggtaactgtttgctttacaaaccgcttgccaaggaatgcccatattagactatgaaaattagactcatggcaaattttcaggaacatgattcttgtgataaacaagctatctggagggtgatgtgtgagctcacaggggagttttaagaacaggtttccattgttggacagtaacctgacagctaggcatactcagaggaagggcatagattagtatccaacaacctgttttaaaaccaagcaatgggaccccatacaaggtccaggttgacccgaaccaaggttagatgaacctgacttgtttttatagtaaacgtcacaatggtgacaagccagcagggtcatcagcacactttgcagctacagacttcccactggacaaaccattttcagcttcctctgtttggtcacacccacaagaagtacgaatggtatatttaaaaagctagtccatcttggttcatttataccagtgtgtaggatttctgtagactctgggctggttacaacctagagctgcagaagggtgcagagcttcatgtgttcattctgtactgtgataaagttctttgcacgtttgtggaaatgcaaaagttcttctatgcacctggcttctgttccggtcatttccttgtatatgggttttgatccggtgtgacggaagagggaagctatgcattctgagatctcagatttcattgtatccaattatttataagacctgagaggtgctttattagttaggaagcactgcagattttctctgtagcttttaaaaatcatcctgacttcctatgtgttattttttgcattggcacccattgccaatgctatgtctcagaagagccgagacttgtggccaataatccttagaaactgatggggctgtagaatttatttctctgtcaccctttttgaaaataaaataaagttatatttttcatttacatggatggacaaattggggtctttaaaataaaacctacttccccttttcattctttttctgatcatttgtagcaaaagcttagtggttttctgtagaactgctttgttttaaaaatcaaattgaagaccaacttgattctgcctgcagagcaaagctatctgcctttttagaaaatctggatggttaaattggaagcacattctgcacatggtttagcagttagtagcctggaaaatgacccaatagccaagatagtttttttgtttgtttgttttttgtttttttaatcttcattgtaagtgcttgtttaaagtgtaagcttgtaatggactattttgcacattgttcattgttaattcttttcaggctattatagttctgtaaatacattgcctgctaagttgtgtcagtggagaaacattagtgctataagaaaatccagtgaaatgtgcttaaaagcattaccaattagcgcatgggactggatcaccgcgatttcttagtgatcctagagaagtcagtttcagttgacttcccatttatttaaaatgggtatgacaacgttctttttggagaatagggcagcacacaaatgcacactatgctgtggcctgctgaagagtttccactgatttgtgactatattactcaatattgctttgtagcacccttagtctaatccacattgaaggagcaaaatccttctgtatcttacttattatacgattatgtaatacatatgttactttatatataatatgtagtagtacttattttactatttttattcattataatgaaaataacaaatttactgggtggtatctaccatctagctcaagctgttctattttgtattgtttaaatttgagaaaagctaatattggttaataattaaaggttacaaaaattgtagtgggaaaggagttaaattctgtctctcagatagtaaagactgccagaacatggacataatcatgggaaataatagggtggatagaatgtgatttatctgcgtatgttaaagaaagaaaaatagtgatcgtgaatgtactgaatatagcttaaactatttatcattatgtacaaatggaaacttacataaaacccctgttgattaagttttatctgaaacaaaggatatgattggaagtggagaatgggagagtattttaagagcatgtgataatccagctagaagcttcagcaagtctgtggtcaaacaagagaagagaaagaaagagcaaggaagcttgatttggttatgcaaatttggagcacacatatgagttgggacctaatggattgttgcactggatttggtcatcaaatgatgcttttcatagcaaatattatctgagccattaattcaaacactgagaaatgcaggccatgtgtaggcagaaccacagcctttttatccctcaaaacaaaatgtaaaagttggccttgatggttagaccttataaagaagaataaggggggaagggggaaaggagcaagtagtgaaggaaaaagcacccagaatggaaacaggcatgcgtattcagacataaatccaataaacagacaccccaaagttatgctgtgtaagaatagacacacagtaagaaatttccagctatcaggctaacaggatggaaaactggagagcacagagcaattacttacgaagaaagaggcacagttgacatcaagtgttatagaggagactggcatgattacaggaagatgttgagaatatcagaaaacatccccaaattaagagtgccaaaaagaagaaagattaccgatgagatcatgataaataataatgagctgtttctcaaagtacctgaagaaggggcctgaaaagtggtttgtcaagcctggaagacagagaaagggtaatgtattgacggacgatggagacactgctaaaaaataaatgaaattttcaccccagtgttcacaaaggaggaggtggttggggacagatgtcagacacagacacaaatttcccaggggagaatgaagaaatacaaaagaaatcaggatcctgctaaaacaggtgatcaaggggtgagaagaagaaaatgaataaaaccccaaaaaccccaaagcttagcggtagtcacctaaaaatcttcaagaagtgagaacaaagaagctaacaagaagaggaaaaacatacccgcatcacttagaaaggctggaaatattttcatgtgtgtgtgtttttatctagttaatttgttagactagcccttttgaaacttgtccttaaaggaagtaagatagaatacttaaagaaaaatgattgtggctgggcgtggtggctcaccacccagagtggaaacaggcatgcgtattcagacataaatccaataaacagacaccccaaagttatgctgtgtaagaatagacacacagtaagaaatttccagctatcaggctaacaggcctgtaatctcagctctttgggaggccgaggagggcagatcatttgaagccaggagttcgagaccaacctggccaacatggtgaaaccccgtgtctactaaaaatacaaaaaattagccaggcgtggtggcacgtgcctgtagtcccagctagtcgggaggctgaggcaggagaactgattgaacccaggaggcggcggttgcagtgagctgagatcatgccgttatactcttgcctcggtgacagagtgagactccgtctcaaaaaagaaaaaagaaaaatgatcgtttaagtggccttgaataaccaagacatctttcctgctaagttcttttcgagttacccattatgcccagcgttgaatgtttactgtgcttattaaggatgatttttgtgtcctaggtgatcactgagtccttgattgggccagtatttactggatggatgcttcttagtgccagggagtgcgctagatcctggactactgggatggaaaagctagatactttctgagggtttttgaagtcacttcttcctcactcatataagcaaccccacctctttccaggcattgatttcagtgtgttcatcatccctggtcttgcttttaaccagctacttgatgggcaaaggtctggagaggggcagcctcctttgttgctggctcagtgtgctgtgctgtcctcagcgtggtgcctgctttttgcccttatcctcagatgtggatccctctcttcccaagctctcctccatcccctgtgctgcaaacaaaactccttgtttgttgctccccaccagtggccacgaaggaatttgcaaacccctcaacctcctactgttttggaattcatgaagtttttgccctgagcaagaggctatactttcaaaagtactttttcctttcttcattttcccaccccctgcctttcaaccactgccccgccctggtgcacacacctccatcccaggctgataactcccatctctatttgaaccacccactcccttctcttggcctctgtcaattttagggctcagcaaaactgggcttactaaaaacacctttcaatttctgttctcagcattaatctgtctttgcttagtgttcaaagaatactttaagatactcattaatgcaaacactgttatgaggagggagcttcacttcggtcccttcttctcaccttcagatactactgtaacagctgtgtgggactggagtatggaatgtttcagagaagctgcttctgagtgtgtaggagagggctgaagaaactttcatccagtacacagttttgtcctgtagtccttgttcccatggccaaaagtcttctggtaaaattaatctccagtgctacctttcctaccaggactgcaggtggtgtcttttagttgaaacagactcccgtggtcccttgattctcatatgtaatgttccatgttcaggtgtctctgaaagctgttagacttcatccaatggagaagggtccattgagctacatcactttcttttttcacatttgcgtttctttatgtagagtgagttgcagtttggttggctttttttctgggaatagatcactcttctggggactgtcagacttggtccctgccctgggtgagtttgccatcttattgagggggtactaacatgtgcgagacaactataatcatagcaataccaaccccacctcaatggctgagtgactaatgagaggagagagtgaggggctgagcagaggcctctaggaagcagctgtggtcaatcttagcctacatttactttttttttttttttttttgagacgaagtctcactccgtcactcaggctggagtgcagtggtatgatctctgctcactgcaacctccacctcccaggttcaagcaattctcctgtctcagcctcctgagtagctgggattacaggcatgcaccaccacacccagttaatttttgtatttttagtagagatggggtttcaccatgttggccaggctggtctcaaactcctgacctcaagtgatccgcccaccttggcctccgaaagtgctgggattagaggcgtgagccgctgtgcctggcctaaacctatatttactttgaatttcactatagtctaccatttcctgatgccttatatatctgacatatatctgatgagtgacattcttgagatgtctgcccaggactcctgaaccccatgagaaataagattgcactttgcagttcttcaaccttgctgtgcatctgagtaacatgtggcccattcatacactgcagatgcctgggctccgtctgtgagattctgtgtttagaggcctgggctgggatctaggcttctgttatttaaacaggaatttctgacctacacattgcttcaaaaaattgtcaattttgttttcaaaattgttattttttcttgaactcaatacttatttttaaatcctttttcactcaggaaaagtgaatcatcacctacttagcacctaattatttaccactaagatatttgtgtgcaaaaaattaataatttttagatcaaagaaaatggataacttctaatatgttaaaatcgtgcatatttccattgagagagagaatgggctgaaattatccctcttttatattttaattgttcatcaaattgatagatttaatctactggccctaaagatttgcttctataataatgttgtgaatgaaaccttcattgctgtagattcacaattcaacatcatacgtatgtggtaggtgtgatttttcttgtattaaaggaaaaagggttagcagatttttaccaatttagaaaaaaggcaagccaaattagagggaagtcagcattataaatatttcgaaaagaacccccattcattattttttgtaatgtgtagctaagaccaagcaacagtgaagtgggaatctttgccttatgcaaaatggttagggaaatagctaaggatgctaagaaattagcttcaatattggttgtaggcatgaatgtttttctcagggacttgggtgattttgttacactttctaatattatctctgctatcttctaggacttattttgtgcagtcaaagactttttaaggctgtctgttctgtaaaagaaatacaaactccaagttgtttgattttatgagttttgttgttgttgttgttgctgttcagtctgtaaaatagtgacgtggataataaagatatttagttgtatgtccagtgacctttggaataataaaactgtttttgtctgtgtgggtttttcacatacaggtaatgttttgttcacattctggatacagacctgacctcaggctgctcagcactgcaatttcataggctcctatgaggtccccggctaacattttgactgtggtggtagaccttcacctcttagatttcatatatctttcattttgcttcttttgtgcttctgttgaattctgtatatttaagaaaattaagatgcagagagaaaattggttaatgtctcctctgtgtcttgtaatatgtggcccaaacagaaagaaaatgtatggaatttagaaattttatttacttgttttcttacatcatagaataccattttaccattgaaattattaaaacctgcttttattgagaattttggggaagttgaaaatgtaacctttacggggaattaaagctgttttattttaatgaataaagtagttaaattattaatcatataaaattatttctctggatgttaataaccatttctttacccaggaacttttttctaatcacagaatcttgattggtggtttatttgaaggcatatctcactattaatggttcaagaatacccataacttttggaaagactcaaaacatattgcataattggattttaagttatgttgtttgtaagcttatttgacttgtatcatgtagtgattactatcagtttttctggatgtaggtaggtgcttcttatgattctttcatagatagtattgagtcattcattaagtctattcctcagatgcttattgagcatcagacttgtgtcacatacttgcacagcttggtgttggagatacaccctttatcaccacatacttggagttgctttttgtctgctgtaagacacaggatgtagtgaacaggccaagagaaatatagggtcctgtgggagctccttacagggagggacatagcacagagaaactcagggtagttgacatttaagttcagatctgagtgatcaggaaaacagccagccagagggagctggcatgggaatggatggaggcgtgtttgagtcatggcagccagatctaaagaaggctacaagtagagagaggactgtgcatttctccttcccatcactggaagaggaagggtatgaggagtaggctctacatgaacatgagagccagctcatgaagggctgtacaagccatgtttcagtgtttatcattcattctgcaaatacatactcagcactatgtgtcaggtacttggcttcaggaaacaaggcagaaaataatgcctgcccttgtggagattttattcaaatggggaagagacaaacagtaaacatggcactagtggttttgaaaatgggtcagaagtatgtgtagtccaaatggttacagactcagcatttgccaatatcatggagccaaatctaagactatttaataaaaataagtttgcaatcatttccagtcctcagctgataactacagatagacttattcttaactcaacatatttacaggtaaagttgaaggttacctatcatttatatttattgctcactcacattgcatcaggcattgggctaagcaagcaagcaaaccacatttgagagaaggtgctacagtttagtgcaatcagtatttcaagttcaccagagtagaacttaagagtagaaggtttatttgttaaataagaatacttgaccttaatggctaccaaaaaagagttggaagaatgaataagatctagtatttgatggcacaacagggtgattataatcaataataatttaatagtacatttaaaaataactggaagagtataattgtattgtttgtaacataaaggataaatgcttgagttgatgggtactccatttacccatatatgattattacacattataagcctatatgaaaatatctcatatacctcatatatacccactatgtacctacaaaaattaaaatacacacacacacacacacacacacacacacacacgaatacttgagaggtgatcagaatgtcctgtattcctggccgggcacggtggctcacgcctgtaatcccagcactttgggaggccaaggcgggcagatcatgaggtcaggagactgagaccatcctggctaacagggtgaaaccccgtctctactaaaaatacaaaaaaaaaaaaaattagccgggcgtggtggcgggtgcctgtagtcccagctacttgggaggctgaggcaggagaatggcgtgaacctgggaggcggagcttgcagtgagccgagatcgcgccactgcactctagcctcggcaacacagcgagactccatctcaaaaaaaaaaaaaaaaaagaatgtcctgtattgctgtttgaaaacacattaccagaaccagaattcttccttgaagttttgaacaatatcacaataacagaaacatctcaagattttatcatgcagccagcaaacaaaaaaattctacatagtgattgaagtagacatttgcttgtcactcaagatgaattattgtaaataaggagtttttattacaatgaacactttttttggcagaattaataaagagcagaggatactagaagtcagtgcatagaagcaaaaggagaaatgtagttgagcatagtgaatagagaagatttgctttcgtttatttgccctatacattaagaccattgaatgagactattttgtgtatgacaagcatttgaaaaaattgttttactctggcaatcttaggctgatttgttttatttcctttagaataaaagttgcaagtgggtaggaattatgccttaaagtgttagcctacaaaggactggaaaactactcaagggtaacagctgaagaggaaatggctctgtcagtgtcgtgcgcatggatgattgggcacataagggacacaagcagggagaaaggtgcagagagaagagctcataaaaccaaggaggcttgcttggaactaaaatagaatagcaaaagtgaaaagcctggggagccactaatgtgatatagtttccctcgtaacataatgcaaatatgtaaagttgaaaacgtgtgccgcctcttgcatagacattgctgtcatcagcagcacacacagttgggtatatttggcgaggcatttaatctcctggctctctggtctctcagtccatatcaccagaggcatgtattttcaaaacagtccagatcaatgtctggtctttgtatctgtggtacaaatataaagcttacttgtccacataacagcaaagtaaatccgtggtccattaacgctaaattgtaaatagtgatagtcacttttgtccaacagtgtctgtaatgtttattgctaaagcccatacatgtttattgatattatcctaatctgggaacagtagctgctagttatctatgtgccaaacactgtgctgctgtttgcaaattttatctaatagcaactgtttgtgaggagcatttgttatctgcattttacccataaggaaggtaggagggacagaaaggttaaaataatccagatggaggacccactcttggtcactggtatgttttgggcttagcacacagttctgccagactctgcaacatgtgttcttaaccatcagactttatttctctggtgggcaacacaggtagatgtgacaggttagaagtattagatataaatataagttatcgagatgatatgactaccgaattcactactgcactttttttacttttttaaaaacatgtatttcagcacactgctaaaccacagcaagaatctttttaaaaagaccttacaagaagcatgattacaggtcacaaaatcaagggaaaatattgtcatcattattttttaataagtgataagtgaggctgatgagtgtagacctgttgctttattaatagaaatatgtgcatctggtgaggacttgtatttgccaagcacactgctggcctggaattagactcctctgtggaattcaggtcagtgtttacacccatagtagtttacaatctttcataaatttgagcaaaatattaggaaagcacttagaagcaatttagagaatcagaattaaagtagaatcggtgtagcatgtatgttcagtggagaggggcgagtagaggagtgagtttctctgacagatgatgaatctagtttgtttactttttgggagaccctgtttccacactcactgacatgtgagtttgcatcctggctcaagcacttaaactccccagtctccctttctgtgtgtgtgggatggagataacaaggccaaccttacaaggttgtatagggtaaagtgcccagtgtaagatttgaagcacagtaagtcttcagtggggctaggttttctccttcctccctgctacttacttcatgaagaggatgaataagtacaaatctctgttcagcgctgcaaaggaagattatcatatttatttatttatttatttttgagacagagtctcactctgtcgcccaggctggaatgcagtggcatgatcttggcccactgcagcctccgcctcctgggttcaagtgattctgctgcctcagccacccaagtggctgggactacaggcgtgtgccaccaggcccagctaatttttgtatattttagtagagacagggtttcgccatgtttaccaggctggtctcgaactcctgacttcaagtgatccatccaccttggcctcccaaagtgctgggattacaggcatgagccaccttgcccagcccagattatcatttttaaatgctgaaaacctaaatttcccattgcactgtgctattactttcacagtgttgactttcagagatatccgtgcaccgccttttggtagctccctatgtcctcttgcttctctagttgccatttctttggaagacccccccgacattagttatctcattttccatgagtgattttgaaacccagtttgtgccacagtaaaatttattgaaatagaagaaacactggatcttgagagataccaccagcacctgcagtcttaacgcttcatctcctctcctgacctgggtccaactcatctttttttctcatcaccgcctgctgccatcttgtttactccaagtcttcaccgttcagtcagaaatacaaagccctgcatgggtcaggtagtcctcagagaaggagagaagtaagaaagaaagtggaggccggccacggtggttcacaactgtaatcccagcacttttggaggctgaggtgggcggatcacctgaggtcaggagtccaagaccagcttggccaacgtggtgaaaccccgtctctactaaaaatacaaaaattagctgggcttggtggcaggtgcctgtaatcccagctactcgggaggctgaggcgagagaattgcttgaacccggaaggcggaggttgcagtgagccgagatcgccccattgcactctagcctggacaacaagagcaaaactccgtctgaaaaaacaaaaaacaagaaagaaggtggaatcaaagggatgtaggggttccacaaatttagatgagatgtcaggtttctcagatgtgttccttgatttgaggtaggtgatcttagaagagctgcaactaaactccaactggctcctttttcccccatgtcttagaagaaaatgtgcttcgtttttattctcttgacaaccctctgcatttgcatctttcagcttcttctaacttgtgtctcctgggacctttcttttcataactctattttctttcatcatctgtctttcccctgactccttttccctttgcttcaaaatgtgcaaatggatcctctcttctctggcagtgattatcaaagtgtggtttctcggcgaaatgtgatcacttacttcaaatctcctgggatgatgtgaaagttgggacccacttcaggcctatgtgtcaatacctcagtatgatatattccagcaactttcccaaaaaactacttagtttccaaggcagtttggcatctcctagagtggcacagcaaattccatgatttttttctagccctgttcgttttgtcttttaaaacctgtctccctcaacatccacaatgttaaaaacgtctaacttgccttctgtttcgctcactactctttttttttttcctgctttctgcttctgtcttcataagtgcaggcatgggaagagctgggaatttggagtcccagtagggtttgattccttaatgtcattgctcagtagctgcgtgatcttgggtcacccatgtatcttcagtagggcatctgctttggaggtttgtgtggcttgcaagtgtcatttttaaattgggagcccaaatgcaattgtttgtgctctaaaaatctgcctcttccagtttgctgttggaaaacttggaaattattggctttgccagggttgtggcctctggatgagagctaaaaggtgaacagccttttatccattctgcttccccccacttactcagggtcctttcctgttacaaatcatagtttgtatggcatggcaagtactggaagggagaaattctctccagtgagccagaaaatgcaacgggatctgtttgtgattgatagagataagagtgcctgatctacttttccctctgccagaaaagtatttttccctgacagctggagacatcaaaggtctgaagctgtgaatacagagagatgaatgttctaatattaatattatatttaaaaatataccacgtaacatttaacatcaacatgtctagtttcctctgtctggtaacccccagtcgtccatatgcaaaaagaggaattccaatcacagaggtcctcactccaaggagacaggcaaccattacgtgtctgtgaatagctgagtaagccaaactgtgatagtttctgatagatcatgtcaagacctaaatagtggaatcttcaggatttggaggtggggagcaagtcacctggattgatgaggactcactgatgaactgaccaaattgtttttttttttttttttttttttttgagatggagtcttgctctgtcccccaagctggagtgagtgcagtggtgccatcttggctcatcgcaagctccgcctcccgggttcacgccattctcctgcctcagcctcccgagtagctgggaccacaggcgcccaccaccatgcccggctaattttttgtatttttagtagagatggggtttcaccgtgttagccagatggtcttgatctcctgaccttgtgatccgctggtcttggcctcccaaagtgctgggattacaggcgtgagccatcgtgctcggccccaaatgggctttttaggagttctcatggaagagatggaagtttcttcttgagtgagagcaatcccagagtctgatatttcacctagtacatgggaagggaacatgttttgtcctaagccaggtgtgaagtatagtcattcatgttgggcaaaaacgtggcaggacttggaacttctgtggggacccacaaaggagaatagaggagaagactccatgaaatttctggtcctggtgttgtgtggatggcccagggccctggccagagagattcaactactaggtgaggtttttttcactttagacaaccctgctaaggcttcatttcacttatatgccgtctgtgggcctttgatggttcttttttcctatatttgctatggatatatttatgcatttaaaaaatttgcatcattgtaacttttcattgacaaaatatatttaatatgctcggtttttacagttttgcttaattagtttttttcccacttatatttattttctgtaacttttctcttttttgttgtctgttttgctctattaagatgttatatatcttctcctccttctccagagtagacctctcatcagttcaccaaaatctctctccagtaagagtcaggaagcttaccgtgtgacaaccccttcaaggcaataaggctccaactaagggattaagattgttttttgacaccaaacattgtttatcctcttaattttgagctatgtagcctgaaatccatgctctgtgatgaaatggaggtggtttatctgagctttaatactcttaaaaatgaagataatgatagagcatagtaatgaaaattaaataagatgcatgcatctagcagagaagctaagaaataggagattcttaacaaatgtaacctcatttcttctttagtttctgtaaaaccccaggaatgttagaaaatatctaggtcgaaaggagaagatcatgagtttggtgttaattttgaggtacctttaaccagtcaagtgaagacatgaagtagacagttgaatttaagggtgtgcagatcagagatgtctgagtggagagtctgcagttgaagagctgtttgtagagatgccagttgatggtatgagattgcttatggagtcttgagtaacaggtgggccttgagcctagcagtagaaggattttcaagatttaaagacattcaattgagaacaaaagagcatgccagggactgggagagaagggaaatgtgatgttatagaagctatgctaagcatagttttttaagaaggaggggatgggtgtgtcttttttggtcatcaaggaagatgagtactcaacagtgtctcttggctttaaccactttagtggtcactgttgacattttcagagagttttcttggtggaatcatggaataggaactgactttccatccctcagagttgagttgtctttcatctgacttggcaaagtatttcttttatgtacttctaatgtgatttttctctattgtttatagttgtttgcacttttcattcacgtaataaattatcagtttcctgaagacagaggtcatgcaaaatcccatgtaaattacacctagttaagtatttagtcttagaatcattggttctcatgatgaacaaaacacatttcttggtctgttcatttattcattcattcgctgaacagtttttcatttaccaattccatacaaatagcaggtactattttaggttatgtgaatatagtggtgaacataagatactcccttttctgtaaactttcattgtaggtggagacagatgagaaggaatgaatacaaatgttgagggcgttcagtgtcttcacttatttgttcctcacaacaatagcatgatgtagatgttattcctagtcctatttcattgatgagaagatggaggcatcaagatatttagtaacttgccagggttctcagttcattggaaacagggatgatgtttggagctaggattcaaacccaggcggtttgactctcagatccactttgctaatcatctcactacactgcaaagtgtttggcacggggaaaatcattattcttattattaatgtagttaatagtaactatttctcaagggagctgaggaatcatttactctaattcagatgagaaaatggacactcatacagctagctattggcagaactgaaatttagaagccatatttccaggctccccttccaatgttttcccctcatccagtacctcttctttaaggaatggagtatggaaaagggaaaagaagctggaagaatgaaggaatgggcaaggagaaggaagggtgtgtagaagagatataggaaataattaaacctgttggatttggggtttttgatgctattgaactgtctggtttttaaagtttttttcccccttatattctcaagaggtagatatccttgaaatgatatcttcatgcaaaatagtgttttatttcatctatgaccaaaaaataattcaggagctaggaaaccttagctccttaaaagtaaaagactgtattttgggaaagaacattgttactggaatttatactgtgatgacactggttggtagacacactagaagctttgaggagtgtgtgtgtgtgtctttgtgtgtctgtgtttgtgtctttgtgtgtctgtgtttgtatatgtttgtatattagtatgatatatatagaagtacatatttattttataaaatactggtagtgtttaatttgtgcatactctttaggggagagggtattgaaatatttttctgggttggaaaagtttttgtacttacatgcaaggctgctctaaaatcaagcaccatattgaaacatcacaaatatacactaagcaagggacagatgcacaaggaatttaagcagagtttttctaaatggcaaataattagaggggaacagatgcctatgggcagcaaaggatgaaatgaggtaccaggaattttaaaagggagatggaaatacaaatgtagaatgcagttgctctcaaggatgtttaagcctagagggtgtgcttgcccaaagttcactctttttgtgggtattgacttaaatttggttctctcttcacctgtcttccccaaagaagtagatgatgctaatcattctgaagtggaacagattttctgtggaacctcagttttggatgatctgtggctgcatctctttcttctgcctccctagggtcttgtccttttataggactgccaggatatgacatttcacaaccatgtcagttctcacttatttattatttataccccatatccttccaaaagggtttttaggtagcctaccaataaaagacacgtatgaaaatatatgtgtgtgtgtgtgtgtatatatatatatatatataaaattttttgtcttggtttgtgttttaggatggacatgtcccttctttagaaacaagtctgctgtaaaatgggttgtatccatctcagagctattctgcgtagtcttgatgtggaaaaggaaacaaatctccaagaataaagtagagcactaggcatttcccatcttcctgtagagtggtagtttaaacagcaggggcactgagcagagcgattgagccacccagcaaagctgagctgtagcacctgatcattatccctcaggtttaagatttacctgttgtgctcattgtaacaaaagaaatgaaatctctgtaattatattggaagggggaggagatcgtgttttagttcctttgatcttgagctagaataggctctgcttttggaaatttaatttgaaagagcccaacgtacacatctgctttttgtactgcaatttctattgagcttgaaaatagaaatttattaatgcaaatgtgtagagtctgttccttgaggaaaagatatactcattcaaaacacaaggtgatcccttcctacatagctatggaagatgttaatatgttttctgtttttttttttccttgacttcagatatgaggttccttgctaacaaggactaagcataaaaattataggatccattggggaatggaaagattcattcaatacttaaaagtttccaaaggacaaattcattggtgaagagctgggggaagcatactgaatcctcaaaagaaaaaaaaaaagccaaaaacaagtgcatcatcaaaccattctgaaaatatgtttgaattgatgatagggcccatgctaagagacaaagctttcatttcaacgaatccaatctgcctagtgttgtgtaaaattgcctttgcctgtaaatggaatggcatgcagattttaggtaggacactttctcacccaacttagcctgtactctatttcattttttccaccattacatgaagcttcacataaatgacaacttgacttaatccttaaagtggctggattgtgtggtctattttgattaaactttttcttgttcttagtgtaaattttcagtaatgcctaaaatgtcatgagcattttgggacataaatcctttaagctattttgcagtcatatagttgttctttggagggtttgagtgctttcctaaactccttctcatctctaaataggcaaaataaattataaattgtcgagaacattcaatcactcttcggatgagcaggcatctcctaaagctggggaaagtatccattttcaatattttgagtaaatatagttgattctttataatatttgtactgtatcaaaagatctcaaaaactgttataaattacctagacttaaggaagaagacatgattaaataattcattggatcaataaaaccaatctgcttttttctgatgtggtgtgatgaagttttttttcaaatggggtaggtgggcctcagtgctgtgtattatccttttgattctattggttactgtctttctctgctccccccttagttgttgtttgatatttttgtgctttttgtttgttttgttttaaagaaaggaaagctgcaagccatagaaagttaggctgtgagttaggaattctgagtttaaagcagggagcctgtccctaactttgtgtttaagttggtgtttcagttatgttgccagtgtaagcttgtgacccttacaaatgtacaatttcatttgggttcagtgattcctggatgagtttgtgatataggatgccaaaggctgtggaatttctttaagacacaaaatcttgagacagagctgattccttggaagcttgtgggtaactagagtctcatgttaactaatctggagggggctaagaaaagtcttcctacccacttccaattaattaatttctaacatttccatctaatcatgactttgtcgagtgacacacatcttttttcctcacaggcaagaaactcacacacaaaatttctatttctaatggcagacagttggggtgccgcagccaagcagtcacccttaaaaattaatgagcgtaatgatggttagaaaagcgattctgatggtggttggagagggaggggccatggggatggcagaaggaggaagaccggactcctcataagtgacaatgatgtgagcccctgtcctcatctcccctcccatccccccttccgcccagtcaccaccccttccatcctcctctctttacaggagccaaagcagatagaaagacagggcgattatgaagacgtcagttggagtgtaggcaggcgagaggggcgcagcgccccagatgaggtccggggggagctgaggagggtcactcatggacgaccgtgtgtgtgtgtctgacagactgtgaaatggtgcgttgttgcacggctgcgctgcacctgggcccttcatctgtgattgattggtttggtcatgtgtaatggtcccatctgctctgtgttgtttttctttttttacttataaacaccgttcccagaggctgagagaggatgagctatgttttgtcatcttcacttacactttagctcaaaaaagtggtcaagtaggtaagctctaaagtctgtccaagtaatgtagtaggaaagtacggtttttcccctttgcttgattgtgtgtgtgtgtgtgtgtgtgtgtgtgcgcgcgcgcgtgtgcctctcctgcgcacgcgtgtgtgcgtggagttttaatgctgcctgttaatatctgaatagttcgtgaaccacggaagaccaaaatatcgcagaaatgatttgcacaactctgtgtattgtgactcttactgcagtgaggatttttttttgtaacggagccaatacttaattaaaaccgctgacatcatggtgttataattaagcgtggcattaattaagctggaataacgatttttttttattaagaactgcttctattgtataagaccattatcgcctaaaaacaaaataattttaaggcaaaaataaatttgctttaacctagcccttttcaacttcccccaaagtccggcctcaggactgtcatcatcagggctccgagtctgtgtgtgcgtgtgtgtgtgagcatgtgcgtgtgtgtgtgtgtgtttggtggtgttgggttgggggagagtggaagtgaaatttgttttttttcacccaaaaatgctgatcggctcctggcattctgatggctaattatgcatcggagagcttcgacagctgcattcatcatcataaaatgtaataattaatgacattccaacaaagaaaaatatgcaaatgaggactcattagcattttcatattcagctttgataatgcttttgctgacaaggttgtaattaatgaaaattcatgtcgcagtcaggagattggatcggtttcattccgctcacaattcccaaatgcttgcattatggaaaatcggcggctctgccaacttttcagggaagaaaaaaacacacacacacactaaaagcaccagatgcaaattaatggtagggagtctttaactctttaaaccacccccctaaatttccatcataggaaacatgtgatgagtgttagcctaagaactagattctcttttttttaataataggaaagtacttttatttgtgacccaagtatgagaatttctggcaaactttttttttaatattaaaaaaaaccccccaaaccctccaccttttcccttctttccttttccctttcaagactatttaaatgtacatagtaaaacatgttaggacagccaagccccagcatgttgtgttctgtcctctggctggcagattcacgccacaacagtttattcatccacatgctttttggcgactcttcatcacgtatttgggcttagatcttctggtgcctccctcggcgtgctacccataaggtcgaaagaaaagcaagtattcgatttctctattcagggtgggtttttttttttttttttttttttggatgatagtggtttttttttttttgtgctttttctttttaatctattccctttgtggtttagtgtaagagtttgagaatgtgcccataattctctcactcaacacttctggtttagtgttgttcttcaaatgtaattttaggagacactctgcaatcaaaatggaaacccagaaaccccagagcagagatatcgacaaatatttaacacagagagctgttaatttatgaaagcctctgtgtgttgctttcaaaatgtggaactttaggttggcaaatgtacacttgatgccaacctggtaccatgtttgacagacaagcctgaagttaaactgaaagttctatctggccctcaaggttagaaagaaaaacttaaacagagtctgacttcattttctatttgatctttaggttaaaaaatgatgattattaaaactggtctttttgctgaggcagatgttttaataaaaggtttgtataatgattaagaaaaagggaaaatagaagtgtacttctttataaattataacgtttataagcattttcactctcagatgaataaaatgacttctgggagttcctaagatgcagtttcctgtttatttaaagttaaattgtaattcccaaagttgctagcccagcataaataaagattataatacgccttgttaagggaagagagaaactttgatatgcggggccttattttttagagtatttcagtaaaacagaaagaatcatcagttatttcacgaaaattttaaaataaatcttttttcccttgtatgtgattaagaatgactgggtttcattccttgttaaactcttggggttccaagaaacagaattttatttcaatctcttgcttcttccaacttttattttgtcacagtttgtacatgaacctgtgtgtgtgtacacaggcatgtgtgtaaatgtgtgtgtgtccatgtctaaagattatggtggctctgtcctctctcctgtaaaatctattgtggtaaaatagcaggcaaaagaaggttttactttttttttttccttttagtttatttctttttttgtgtgggcaaactgcccatccagatggtagaatttcacctgtaagcaatctgaaacgataggttaattctgacattttatagagctttttttattttcttttcacacagtacaactaagtgcagaataactgctcaagataatgtttcttttttttttttttttcttttaaagcgctttctgctgtgattggttcttttttcccccaaatctgaatttggggctcatttaaaaatctgtggctttaggcactttgctgttattgtcaaaaccacatctaatgaaatctttgaccagcttctaatatgtgtaaatgaggaagtgatggcagaagtgaaaaagcaggttagtcgccgagaagcagatccttgtaattttataacgctgaacgttccactggctttgataaatttactgttagttttctcctcccaccaaattcacagatgtataccaactcataacttcccaagtaatgcctagcatggtattagcccccggaatcctgggacttgcttttgttgtcagtgtggttagcctctggtggcttatgtgactgagtaaactggagaaaaacttcagggtgattcgttgtcccgtgatcaaggaatcccattatttccaaaagcgggttagaagatgtttttggagtagagtgtggaagggaaagggagtattggagattgtttttacacataatcatggtaatcatgctgtgttgacaagttagttttgaatgtgccaccttcttgtttttatttctagaaaaccttcattttcatgaattatttcttgagctgatgataaagatgactttagagacatcttctcccctggtgtattcctttagggaaacgtttttgaaagtgtttccctttattatacctgtaaggcttgggacctttgtcatggcattgtttgttgttttttccgtttcctgttttgcacgtgttaattcctgtgggcattttctttttaaagtgatgggatttccactgtccagcagcaagccacatttactggagttattgaactctgtaataggaaacctgtgggtgatcagttttaccctccctagaagatactgcttcagtcaatgagaattacagccccatgactgagaattttaaagaaggggttccactaagacacccagatgttttgtttcaggtgttgcaacaaaatcaacatttgtttgtgggcagcgaagccagtgttcctgccagtattcccgttcagtcgcttctcatatttcccttgcaaactttcccattggttggggtctgtggagagatttcagtggctggctggtggaaatgtttgggagaacatttgcgtatcaaagcaacctaaatatttgcaaaaatgtttgcttgagaaaaaagaatccacttaggattaggaagtaactgcttaaacattttaaaagcatttgtgatttccctaagtatattactcatgagccactgcctaacctgaatttcaggggtcactctggaatctgtatatttaaaaaccctataagataataaaggttttgctttatgattaagatctgaatccatacattaaaatgaaaaaacacttgacaagacaaaatatattttaagaattgtttatcatttagtgaacctgcaaaacaaaaggtgtaaagaaagggcctcatgaaatggttggatgttgaatacctctaacgtcattctttccctctactgtagattttttgttggtaaaacccaattgtattgctatgatatgacattccttctgttggagtccataagctttcttccagtggtaatgatttgaatgtcagatctttttcttgagtttaatgtaggcattttctgtccacattattaaagtttcagctacattttactgatggtttggaaacagtatgtgtaaaactcagtgtaggccaatttttccaatttgttaacaaggtaggagttgagcattgacaattactgtacttaaaagcccctcggatcaggtgttattttaccatctggacattttaattagtaataaaagtgtggatctggatacacagaaataggatctacagtacacaatggcccaatgcactctgttggtgctgaggtgtatgtggctacattttataaatatgtatgtatgtgtgtgtgtgggcaagtgtaattatgtgccaggtgtgtcctttttcaaactgggcactaacacaacaccaaagaatttggctacttttcttagataaaaagtaaaaatgtataatctataaacttgcacataagtaaaactgtatctttttaatgctcctacttcctcaagtatggcatgacaaaatataatgctgacatttaggtaggcctgggcaaaagatgtgactcttctctttcatagctgtgtgctctaaggcaaataaattaaccaccaagtatcccttttttctcatattcagaatgaaagtataaatgataattgttatggtatctacctaacaggattatgaggaagctcatttgagcatgtatgttgaaaagcacttaatgaaatataaggagtcataacagttcttaacaattgattgttaatacaggatgcagatgaccaattcataccccacataccatcttttataattcagtaaatcatctcatatttaaaaataagggagatgcaaatataatgttacattagattattaacaaatgataagtttaagaccaccagaaaaaaatgtgttcataagtttcaacataaagcaaaatgactcattcttataaagtatatacaggctcattgacgcaatgttatccttaattaaggcaaaagcgatgcatttgagggaaatagtgaccctctggagaaatagagaatgaaaatagtttagggaaatgaatcttaacatcttctcttttggaaaaattcatgcatgtttctcttaatcattatgaatttcatgtttgcaaaccagtgtgaatacttaaacgataatcattattgtttagaatctacctattactacacacacagatacacacacacacacacacacacacacacacacacacacacatttgctcaagaaaatcatcctcaggaagtaaaggagttgataaaattaccattggagcagatgagtttggatacttctactgaaagctgtttcagtttttattataggtacagttctcccccgagaattctttgggagaaataaaaacatttgtttttaatttaaatgagtggtaacatgctgtagcataatattaactatttcagtgattttatcaattttatcttcctctgccttaatgtaataaatgcatatcttgattaagtacaaatctttacattacgttgtccctaatgacaaatattattttaggcaacttagttttaatcatcagagtgtcttagggagcttataaaacttgtctctgggacatggtattagcaggatgtacagagttcctttttggtgccatgctaggaggagagactgacagagtcagtccagtccattcattcatttgatagataataagtaaaccacagaagaaacgagaatatgtcagttctgactgtacaggttttaagattttttagacttaatattgaaaactagttttacttaatgttctatcagtttcatttaaatgccctaatccaatgatcactttcatttaaatatcctaatctagtgagcagatagggcttacatagcatttgtcttgaagacgttttaaaaatgcagctgcaggtcctcatctttgaaactccatttggtaaaaatggccatgtctacctttacctgtagatttaagtgtccacagtcgcgggatgagaaaagaaattgtgacacttcttgaaaaatggtctcatcaaagggattcagttgaaaatgtgagggactgcatttaaactttgataaaaaaaataagtaattctaagtaaagtctgtagccaaactccttaattgtgatgcatttgctgagttcccctcttccgtcgtcgggcctgctctgatgccatatggcctaccatggaacatttaacttgtcagatataatggattgtcctggaagcagatttttgctttgagcactcggctcctttcttgcatttcactctcagctccaggctgcaggatgaaggattgtggtagaagtgcaaagaagagacacacagttgattccccttaagagagtgacctatatgccacaaaattttacccacgtaaagaggcattatccccgtcactggccttagcaggctgcatgtcaaagtcatttaaatttccctggacttaacagattgtgtaaacatttcagaactgagagcttaggaataatgaaacatcgtcattttaacttaggcaaaaatggtgcagccatattggccaaaggaggcatattatttattgtgacctacatgtaacgtagaccacctggtttttagattctataaattaagttctctcaagtttatgaaggatgctaaaaaatatatatattatgatggaaatgttacttggctttattgtttttgtttcgtgaatagagaggtgaggttgaaatgatcatttaggaatcgcttcttagccttttggctaagatcaagtgaaatgatcatttaggtggagggacagtggcagctaattatcctaccaggctttctagcttgaaacttaggggcagaccttccattcattctaacctatttgaaattagagattggatgtgttatggactatttaatttttatctgtaaaagtaaataatgtagtctttgttcattttaatttggtgcttttatgagttaatttttttttcaatttgtgctattgtttcaacaagcttggaaaacagtaggaacaatttgtgacttttgcatctgtaggaaaacttctttaaaagaataaacagtgccctacctatatgtgtgtgtacatacatagctgtgaggtactcttctggtataacctactgtaaaccccaaagcaaatattgtgatatagagacacagaatagacaatttacaagtaatcaatcaagcacaaaccagtgggaaaataaggaacttatgtatctcaatttattctttaaatgctacatatttgattgctttagggttgcaaaagttaattaatagatttgtataagacacacagaaatatacatacactaaaagagactttgctaagtgtaattcaatatactcacaaaaatatgtgttaattatgttagaaatttaatatttaatttaattccataaatccttgcattacaaataagtcctcatacaggtcagatagggcaataaaaactactgtggccttgaaaactgacagaagctcacttctgtacaaatctttttaatgaacaactttccatcgagcagctaagaaatatctgttaaagtcagtatttaatactaaagtgtacttatgtatgtttcttactgatcctaaattgagcacgttagttttatcaatgccactcatcggctgactgtacccctcctcccccatacagatttggtgagacttagtactaaataagtttggggagtgcctggccatagccggctcttgttggggcatgtgcgccctctgctggctgctcacataggaactgactggtgtgtgaggttctttctttcttttacttttcaaggttgggttttttttgttttttgttttgtttcaatttatttttatacaactgatcagatatttaccatgattataaagttgtagcttaatactgagtatggccgttaatttgtttttatttggaaataaaggtgaggttttgttttgggtgtgtttttggtaaatagatagtcctgatagttcaaataacatgcaatgtgtgtaatactcttgagttttttaagtggttgattgtatatcacgattaaccatattttcattgctttcatattccccttgccttgattgtatttgagaagtattcttgttggactaagttgggaatagaacttaaaaggggatagataagtcattgaaattttgaaatatgattatttgtctgtaatggatgtggtaggtaatccctagtagaaaaattcctgttatggttggttgatagttttcacttgctttgccaaggaaaatgagtatatttacatcataatactttataaaagcatttttggtttccttgcaaaccaaattaagctgtgctcactggcagacattgagaatggtagtttgagtaaaatattttttgttttgttttgcttttgcagttgctgtttatagagtatgagatgttaaaggaacaaatcactgatggtctctttactcccaggacacaggactaaactatacaagggcagttacagaggaagagtgtcagcctctctaccattgcctgggtggagagcatccttgggtcctggtagtgaaggccagggctctgtgtaatgagtgtgtcttttaaaaatagcaacaatttttgttgacaaggctccatcaaagtctttataataatttagtttgtataagtgatttctgtgtatctctgaaattaaatgacttgatggagtcagtttggtatttgttgtacagagaaggcagtttagatttttatagttcttttgtcttacattgcaaatttttctaatttgtaagcaaaagccataaaaacttccaaaccaaccgtggagtgatcaaagaacttagagctgtggaagggcagaaatgtcatctacgttttttttttcttttcttttctttcagtttttcccctttgcaattttaggttccagttaccttaaaatttgttttggataaatgatataaatttttacttaatagtctttacttactttgatttaacattgtcaaataactaagaattgcattctaacaaatattaagtccttattacctctgttagaatgtcatcttgcatgaaatctcacatacatgtctctcctgttaccaccttgtcttcaatgaggttgtattgggtgctctttcttggtgcttctctgggttcccattatatcccttactggtggatagcattgtgttactcctggtatttagtcatctaaactcttacctccttgagaataatgtgcattgttgactctcttgcatccagcacatgttacacagaaagcacccaacaaatattaaattccctatattgtgttttttaggcctcattcaccactattcagatgataatttttgcaagtttcaggattaaaaattgtggtctgtaaacatagtatatgtaatgcattttattttcttgcatactttttataggatgaggtcattcttctggctactccttgtctgctttcttttttctctttttcctccctctcatccttccctctgcctctcctcttccttcctgtgctccccaccttcctctcttgattgagtcatgctcctagattcagtcattgagaggcttctcttaaacactgcagcatgggaccattcatctaccaaccttccccttccttgaacaataactagtgctgcaggctggttggactctggggagtgtggccctgcgtatctggcagtttggttattattatgggcccattctcttgaagttgatcttgaagagcaggcttggctggaaaacatcattcttctataaatataatggttagcaatcttcctactctttgtcttccttggaatgtgttttcaattctgggctgttcctcccactcccctccagtttctctcagtagtgcatgtttaggggatataggtcaattgtattcagtgctaaggctagagaaatgatcatttaatatattacagatacgtatacaaatggcagttggattatcttctgtctggggttaaaaatgtcacttatatatgtgtgtttatgtatgtattatacatatctatataccgtatataacattgtcatgtccccccccattcttttgatgtagttttgagtatcatatccaatgtgtatagtttaagagatgaacattgttatattcttgttcactgtaaacttagcttgaaagttaaggccatcacctgtgtaccatggtgctaaaatacataatttttctatatagacaactaagtgcctatgtagactactctataacaaacaaaccttttcctctcttttccatctcactgtggcttatttagagttgtatcatttttatcttttacattgactgttgctaagactctggtggaacattcagttaagtgagcagcatataatttatgattaaaagtgatttgtgtggtgaaatgcggctgctgatttccttcatattttccaataaattccaaaatatttagccaggcaccaaagtcttgcccagatgatgttgtctctattacattcagccagaaatgtcacccatctcctccaatgaaagggaaaggaccggattttctccctcactgtggacttgtcatgcctccacagaacgtggacagagaaggggtagaaggacccttttaaatgaacgaaccaggtcaggttcactagagttggatcctggattctaaaggtgacatccactcttgagatagaagagagatgctttcagagcagcgggccagtgggtctgatcaatgaggagcaaccttaacaaaactccgggattctcatattttgggatactgttgtttattaggggaatcgatttggcaatgtaaaatcgatttcttaaaaaaaaaaaaaacagccttcattattggagatgagcacatttaaaggcctagcacgctgccagagaaaggtttctctaacccatgaaatgtaactgtctgaaatgaccttggggatcaacaagtccttgtcttttaaaaaactctgcgtaaataggtgagtgctagtagtaatctactttttgttatctaccatgttaccaggtctattggagttttagctaatgtaacctatagagctgtgcctatcacttaaattggttgcttgtctccctagctggtcagaataaccagtggaattttatttgcaagaaaaaaaaatctgttgggcatggtggctcatgcctgtaatcctagcactttgggaggctgaggcaggtagatcacttgaggtcgggagttcaagaccagcctgaccaacatggtgaaaccccatctctactaaaaatacaaaaattagtcggatgtggtggcacatgcgtgtaatcccagctactcgggaggctgaggcaggagaattgcttgaatccaagagatggaggttgcagtgagctgagactgcatgccactgtactccagcctgggcaacagagtgagactctgtcttaaaaagaaaaaaataaaaataaaaagagagaatgccagactctaccgaattcacgtaccatggagaagagaacccaggaatctgtttttaggaaaagtcttgctgataattctcctgatcagcaaggtttcttagccatgaattgaatttgaggaaattgcttttctccacactcaccatctcatcacaagtcttccttctgcctaagaacatagtgaaaatattttatttctgcgtgcttttgacacctttagcatgtattgcaagatgagctttttttcatttttatatgaaaaactattatgttcttttgaataaaaaataagctttcaaatgcatatgctgttttttctaagaccacacaagtccttaattgccttggttatatccaattatcatagactcaaactgcagtaaaaatataagatagggtaggcatcactgtgaagatgttattcacataaagccaatggtaagttactcattagaagtaagttgagtgatttcagggttgcccttagtccttcaggtctctaggggacccttgtacaaattgctgattcagaaaatcattactttggtggttcaagtggtactttagtggccttaaagagttatttgacacacctccccaaacagctaagttatccccatgattatgttgattaattgcacactctgtggaattagtgttattttcaatgaaagattttcctgcgttcggaaaatcaagcataaaactcatgtgctttaatttgataatgtgtgtacttctcctaagcaggatgccaagtgaggggctgattttggttgttgttgtctgggccatgtgaaatcatctaggacaatatttttattctgcactgaaaaggtagtttttgatggactgtaggatgttcactcaaaatgcttatcgattcggacattttcatccatcatggaacttgagaactctttgactttatgaattgagtttaaattatttggggagaggattacggtagtgagaaggcaatggttgttgctacagtaggcactaataatgatacatctagaaaactccaaacggaggtggcatattgtgggaaagccttggtactggaactggaggtctgtgtgctaacttcaccacttcatatctgtgcagcctttttaactatatgagctggttacccttaattttagtgacttcgtctataaaaacatggactaaaatgcccatttaatgagcttttagggtgtgttgccttaaataatgtaagttaaatttgcatgcgagatagtgcattacaaatataagtgctctatggagaattgaatatagaatctgaaattcttcacttaggcagagccctgaagtgaagacttttggtggcaccttaagatactatctggggtttcagtacccacactgtgttaaaggcagcacaatgcctagatgagatgaggggaatcagtgatgaaatgcagccaaaactccccaatttccagtgggatcagagctataggccattactgagtattctatttttaggactaaaagaacatcagcggaagagagagttaatgccagtcttttccagaaaaaaatggtttactgcccatttttcattatcccttgatacatacaagctatgtgcctagttagttaccttttcccccatttgtctttataggatttcctaggttgttggatgactagtttatttgctggaatggagttgtaattcttttagcacaaatttattttacatttagatttttaaatgactgtggatgaaggcagagttgtccctgtatcgtaagattctgtaggagagaaccagtactcttctctgaaatgttggaaattgaaagaataatgtcagcttctgcttttttgtaaacccagagtctcacctccaaactgggatcaggagtaaagttgactagctagtcagaacaatgaagctatacctgcatggccacagattaccgtaagacatataagccaatagaaaccagcaaattaaatagtcaaaatgttttcatatcaatttaaataaaataaaaatttaatttttgaacctacatcatttatctgatagaaaactacaaatatatagtaacctgatatattcttagtgttaagttgtaaataatagtagttctgaaaggtcatcagctcttgtattaatagacacaaaaaagatggggacgggcatgtatgctcaagtcagtttaggaaacattgtataaaactaaattgaaagccaagtacagtgtctcatgtctgtgatcccagctcctctggagagcagtgcagaagaatccttgagcataggagttagagagcaccttgggtaacatagtgagaccccatctcattaaaaaaaaagaaaaccctgaattaaatgtcttaactgcagtacttctcaagagtctttaacatgctagatacaatgtaaatctgttggggggcagggcaatagcttgtaacagttcgtagattcttttaattagtctcccttttggtttttggagcccgttgtgggatcactattctatagatgacactgagtgatgctgggttgtcctgtattataattatatttttacttttactcttctgtacatcttaatacaaagacatagtcttcacatagaggtgtagaaatgcagttttctgccatgtttttgttaattagttgctttgtgttaatgtgcggagatggtggcagtttattgtaagatgtcacagaatccatgtgtatcatttgtgcagctataaagtacctagagaccttttaggaataaaacaccatgtaaatgtaaattatcattgcctataagacactttcattaatttcatatcaaattcatgagtgttttgagctctgggatttgagagtcttcagtgtcgggcctctagtttatttatacttttttttttttcccccagagtttaaacaccagcagcatagcatagtgctaagagcacagtctgggcaaacaaactgccagggtttgaatcctggctctgtcacttgtacctgtgtggctgtgggcaattttctagatctcagtttcctcatctgcaaaatggtgtttctattacctgccttatggggttgtgcagattgaatgaatcattttatgtagagctttgagcagtggttaatacatgataaggacacagctattcttatttggacagggaaggaaaaggcaggcatggaaacgatgaaggactgtaaataataacctcatgtatgtgttcagaactactaaaaagttcagttgttgtttaatgaactagtcctttctacatatatatagattcacagggtaatcagagatggatgggactggggatggggacagaaatttattctgagtcaaacatgtttatgatgagttccctagtctgatgccagggaacaaaaggctcattcttcagttcccagaatgaggattaacagtgaaacagccttgcttggtgttgtcctgcagcatcagataatttttcatcaaggcgtttcacgggatgatatattctcccatatagatgaatctatttcagcggtgggtgaaacacctaccatttatatataatttttaaagtggcattttacaaatgaaaggctacacaaccaaacatgaccctgttattatcctactggtcaaccacaagagggatcatctctgttagagcttatctctagaaatcattttattgataagttgctcgtctgtctctagctctttctaggtggtttagaactgtcatgtgtatccaggggcagtaatctaccaaaggtgatccttcttagaagtatccctatgagtggaatggatttatgagatcatttttttcccttcatgtaatattttcattgtcacccagttcccttacaataggataccatggatgtatcggaagaaaaattggaagtcaaatggctgataatacaagaatataaaaatattcaatttgaaattctatagacatttgttaaccatatcaccctcaaataaaaagcaaattttcctgctccttcttgggacagcaagataaaagattgttgaatagatcagcaaaacattgacttttttttttttttttttatatggaagttgcttgcctttcctgctcatattagtttttctgggccaggggaagcaagtgaatcctttattgattgccatttggtgccatttttaataatcaaatttaaatataggctttagcagcggacgggttcgatttggacagaacacatgttgacttcctggactgtttgctcactggagatgccgacttgttctgtagacggggctgcatgttgatctcctttgtctccagaaggattgattgacggatgttgtgtctgctcatttacagcgttttccttgtttaatttaaaaaattgtgacatagtattacatgttcccttgtatacatcatttttgcagaagaaagttgtttagccaatatgtcgacttagtttatgaaatcctctctatagctttcattcagcccttcgtgtactccattaggtcatattcatttcatgcacggcaaatcgtcaccagcagcaaaatttaacatttggtccttttaggtataaaaatgaatcaaatgcctgacaagatttgtttctggtatatatttcagaatctccccccgccccccgcaccaaccccatctttatgggcatacaacaaatgttactaacgggtacttttagttttaaaaatatggacaacagtactccatgcagtaaaagacttgagcgattaatgctacccttatgcctcttttgagtagttttagccatggggcttggcactgccaccattgtctttgtgccaaaaaatatccgcagcggctgtcgcattctagtaccggagggttgtctcgaaaattccgcagtgaacgcgccgggtttgttcatcactgctatctcttttaaatattggaaaaatagaatctttagctctttcaaagccccgttgtggttgtggggatggggggaggcgggtggtgaagaatggagaaaggaggaaagaggctgtccgcgccagccagttggtataagtgacaaaaatccatgcctgacatagagtaaacacagatatttaagagcttttgtgttcatgagcacagatagttacttaaggatcctactcaaacatgttatcagcgctcttgaaaattttattatctgaaacaaatgttccaagtgaattttaagcagaaaatcaacatcaagaccatagctaatttttaatggataatttacacaaaagatagtttcttttctagaaactgaggtgtccttttaaaatggctgcttttagtctttaaaaaaaatgataggaatcgcgattttatgtttgagaaggtgcgtgggctttatccacagtgcctgattattttgctcccaaacaggggttctggctctgagggcagatttatagttgaattggggaacaaaaagatgtaataaagttaaaagcttacactatcagaatgaaatgtgtttgttcatgatctctggaccgatctatttgatggtaaaagtggatgctacagatgaaatctttacaaggagcataatccttaaaaaaaaaaaaaaaaaaaaaaagtccacctcccagcctcctgctggctgtgctgcctctttggtacctcgcagacttcgacagagccctggacgggtgcccattgatgtcatggaaacactcaaattactgagaatgattcatgtctatgctggtctcttatcctcccccacacaaacaggagtagatttttaaccctgacaacttgtaatttgcagtgggtttatttttgtatctggataaatattttttaacaagcaaaattaagattaagcagtctgtatctgatatgatagtaaagaatgctgggttccatgtagccaagagtactttggggactctgcagcgtgaattcatattcttctcctcctcctctccctcctgcctctttcttttcctacctcttgctctttgcattccactcttcctctctttgtttttctcctacttattctctctctccttttaaaatcctgcccttttatctttaaaataatggaaggagtagcccaacttatatctataagtgaggcaaatcctggcagaaagattcctccctcctgttctgtgtgttggagtcaagttgggaaataatgctgagtggtgaaattctacaggggatagcttcaggaattccttctagagaaaaaaatagatgctttttcttccttaaactgtattttacaatttggatttttagaaattaccaaaacaggacactagatgttcagtttcttaggaagtcagagcagattctactttatccatctttctgtctttctgcctgcctccttacctgcccagcttcctgcctgcctatctacctgttaaacaagtgaatattacatcaaagtaagtgatgtaatggtgatattgaagcattcttagatgcaagagcttaaggaaggacacgcgtcctttgatagctcatgaaggtcgagccttttctgttagtaatatttatagagagaagttaaagggtataagtagcttaaatttgatgtacacagatgagtaaatatgtctttgtgaccattcacactgctgatacaagtataaatttatcttttcttcagtgcaaaatcctcatacaatggaagttattctgttagatcttctaagactgacagtctgtgcgatggtgtcttgtttcactgaaattgaaactgatatggggcattgattttatactttgcgctgagcgctagaccagaaatggggcggaggtgttttcccaactttaagattcattaaaatcagtagaaaagttaatactgggaaacggggttaattttaagacttaggtttggctttctttgaaaaccaccatccattttatatatgtaatgacttggatacaggatacccttttgaccacatagaaaaatttatggatataaatgtatcaaagatacattctttgtgtggggtcaggaaggcatactctaataacattgccattgccattgacctaaaagataaaaagactactgttacttttagcattcgtgttgagttgagaggggaaaacttgggggttgtaaacttcagaaggaaatctattcagcctctcaaaatacaagtttagagttttcctgttggaaaaaggaatactgtagtcctatgtatcaagtacaattactgtaaagctccagtcttgacgaaagaagtatcctttagacttgcgtggggtggggtcttaggcacctgcctgcctcttttagccccttttaatgttctggtatggacagatttctacaatgattctccacatgtcactatctggactctactgcttagatctcttgtaatgtgatttcattatcctccctaatgattattggggttaaactttaaaaagaaacaaatgaacacccttgattttattcttagatgtggccgaatagcatcgaagggtctatagatctctgtagagcagtctacagataaaaattgggttgttagaattggaacaagacattcacattccatgatcccttgtcctgctgggtctattggtggaatctgaacttgggttcagagtaggcaatttttcaaaagccctgtttcccaaatgtaaattccatcatcatcttgatcatgatggggttcactcctgggaaagggagtttttaaaaaagagagagagagagagactcagaattttgaatagtttctttgctaaattcaccatctggagagcctgtgattgattagttttggcctcactattaagtgtcaatataatcaatgggaattactaggctagggtcattacatagataatttgcctgctgtgtaaataaaaatgaaattgtttaaattttgtgcaagagaaagtgaaaataaggagttacgatttgtttgttagagaaagtggaggccattggaatgacagtttttggaagtgtggagcagtttggctaagaataggaatgaaggatatttttttccagtttatcatagccagagtgaggaagtgttattccctctcttgcttgcatacattgccagtagtgcctactttacgtatgtaaacatcggggaagagcagtagatgtctgttacctggaggagatttttttttaaggaaaaacacaatttacacttttttgtcgtttctcttggcaggtaaaacagaaaggggctcatactcatcttatgggagagaatcaaacttacagggttgccaccaggtaagtgagaatctctgttgcggaagggttgagaggattaacctggtaaatcagtttgttttctaaattagatgatgcattttaaactgtgacaccaaagatgcaccggcaagtcagatgatggctctctctttaagtaatgaaataacacagagcttagaactaataaacacctcatctttagatcgctgctgtatcagaactacattcatgggcttgtttttattttttaatccatcagccggtaccagtggcactgtttgcaaaccagcaatgtcggtgaaagtggttctattaaaagagtttatttgcaattaagaacttaagaatttcttacgcaggaaatacttcgcggagtcatgtgtcagaccctgggtttcgggtggctattgccctaaattatagttttcataggggctgtatgatgttgtgtgaaaacagggttgtattgagggataaaaatgtctgtgaaaatatgatttgttgtccctttttgtttctgaattgtttttggctggaagtcaaggccagcaggctaacagcaaagccgtctcaagggaagcatgcgtgagctagaaaaataagagtactttaattaaataataaaatgccagtgtaatacaaaggtatagcatgtgtgtgtttgtgtctctgggcactttgcatttgtatactttaaactctccagagagagcctatttctaaaaatactgtcaatagctaaaagtataagctttgtttcaagacaactgagtttttatagatgctttctttttcagttcagtatcagtattaatcatgtatttaaaatcttttttaaaaatttatacttcctttttataagtgcattggtttcttactttggaaaactcttgatggaatttaataatcctctttaatattcagagctctctactgtttttattattcacgcaaacaaaatgtactttttttttttcaaatgctggaaaggggatgcttactctcttgaactctctcaccctctgatgttcttgatgggggaaaaaaatctattttaattttattttaaacagcccatttaatatacccctgaaaaatgtaagcaaagttttgtttttgtaattaaatcgagcctatgaggaaagtttcctttacgtaccagacataggaaggtacgacttctggtgggttggtgtgtttgttttttccctgtatatatttgcatttttaaagtttactcccttggcccagccaccaattcagtcatattcggcatctgaaagatttgttgcattgaggtgaacagtgcttggttaagagctcctgccggagtgcagttcatggcagtttgtttggaaagaattctgcaggaaagaaatttacagccattccagcgcaacggaaacatctttggaatgtgagtgcaaatgttcgggctagatagcctgggcgacaagcctctgagtgctgtgtctctggtgtaaagctctcagttcctgcagaagaccgtgttcctgtgggtctggtttctgagggtcaaggcggaggtcattagagttttggggagaagaaagttgacaacatccttcctttctgcagatggtcatggcagaggtctctgttttcgctgggcccctttttctggtcattgagagaataggcttcctcacccctgtatcctttcttactaataggaattggcgtgattcctcacagacacaaagatttcctctgctgagtaagcgtgaggccccttaacttgtgaaagcatcatccagaccgtgtgagtctgtctgtgtatgtgcagaacacagaccctcctttctccgtttgtggggaatacttccctcgggtgaaactgaagttaatttttttttttttccaaacacaaggtgagaagtggaaaggggcagagggtggaagagaggtggatggattggcatgtgatggctgaatttctgggccttgggaggttcgttttgaggcattaatgtccaggaaaattcttttgtatatagcactatgactgcatatgcttttcttaaaaagccttcgtaatgtagccgtggagtgtggagattccttcattcttaatttgtgcttcatggttgtgagtcttgcaagagtctactatctctgtgcttagcgtggtcgcagcaatctccataaacagtgtgattacttagggataaataaaagtgaaattttggaaatttgctgacagagggaaaatagggactgaagatgaaaaatgtacagagtatgaatttctgctttctgtgaaatttgagaatagaacagaccatagtgtgtcttccagtgaatcagtttctcttgtgccgtattgttatttgaatccctgtctacaacatcagctatgcaaaccaaagagaaaggcaaaatctcagtatcttgggcttcaagtctaaatagcagatcacagctgaaatgattccccactgtgtgacaaggtgagtgactcgtggaggggaggcttttgttttcttctgtttactacatgattgagatacggaataggaaaccttcagatggtgtgccctaaggagctccaaaagctgctttatcgtattataacagtgtatcctatggacttaaaggggtgagcagtgctatatggaaacatgcttcttccagtctcaatagccttttgtttggtgtagagacagagtggtggtaagcaacaggtagcaaagcgctgtcctggaggaatacattattattgtgagacgtgtgttgtttcagaaatatatcaagttaaaaatagatatatattttagatttctcctaaggatttaacactaatactgatggacatatgacgcttttttaaatggatatattttagcagaagaatgaaagccggcaggttctttattagcaattaagttgttttcattaaaaatagtaatgagatattatttcattaatgcatttccacctgaagttatcagaaataaacatggtgactttttgagacttttaaaattgtgttgaaaatgaatcaatagataagcaaaagtagccaaacgaacttttttgagttcttactaaatatgacaaaactaatttaaatcaaattggggtacagaaatcacacccagcttaacatgttcttgccaaatggtaacctcatactccttttaactggcagagaaaatgaaatttataatggaaagtctgacagaaacgaaaatgagtgggaataaagttttttgcaagctagtccaaccttaatactataatagccaataactaaaacttaatgggcatcattgcaaatgccagaagggaaaaaatgtcatttgttttggtttctttttgctgctttgaatagaatgttgggtgatttgcaaacttttaaattttgctaaaatctatttttttaatgagatgatgatatcaaaacaaatacttgttattacttctccccttaaatggaagtttagagttgattatcaggaattgtttgtattttctttctgggatatagcccaggtctaaagccatggtttcatttttagtattgtgtgtgtgtgtgtgtgtgtgtgtgtgtgtgtgtgtgtgtgtgtgagagagagagagagagagagagagagatggggagagagagagagagagagaaagaaagctgcctatctgagaccaatcaaattagaatcttgtgagctgggcctgtgcttttctgacaactccccaggttattctaatgtgcagctaggttttatcatttcctagaatgttctgtagaaatataccctgtattaatgacttgtgttcaacatatgaccttgaaaatgcttttaggctttttgcattaatttgattattcaaggcatggaaatatattgcatatgaacttcatttaaaaggcagtgaaaattagtgatatagtgaaaatcttcaaatctttatatagaattccacaactgaatgtcccagcccatatcttgttttctctagtgaagtccaaggctttaacctcatccaaattctttttcttcttcagcaagtgatcaaataggactttgctgatacagttatttaatgtttacatcttaaaatgactaatggaatttaagaattagacctaatctaggaggttgttgttaatttccagaaacttggagaccagggaggaaacatattttcttagtttgcccataggcttgctcatttttggttcatcgaaattaagcatgtagttgattccaaaatgaatttcacatttcagaattgatttctttgtcttgttatttttacttttgattcaataggtattacaaatgacttaattctaaacttttggcctcttttagtttttcttatctaaagtcaaaatagaaaggatgtaagtgaaaaccgtacaaaattattttgtttattacgaaattggcaattgaggccaattaggccttgcgcaagcagaaatacacatcgctttttaatttactaagatgcctaagtgtttatcctgagtgttcagcacatccatcgaggtcttatgcatccttcctgggaagctctcccttgcagggccttagcacctgtcttcatcgtgctttttaaaatttgccatcatttttatgtgtttgttgcatgctgatttccacaggattctgtaaactcctggagggcagggaccatgtctgctttatcctgaatgtgtaccatgtgcctagcagggcaaaaattgcaatgacctagtgtttctttcctcagcatcacttttggaagccattttgagggagtaaggtctgaatagcaatgtacatgaaccatattgtgagcatctttttcatgcctacgaaaaccagaaaactgcactctcccaaaaaagtcctttggaagctcttccttctaacatgctgtgcaggctctggaaggacaccaaagtcataccgtggagagacacccactctgactttttggggggttgaatcgtctcattcacctggtgacttcactgttctaggcctgtatatctggaaaggcctgaatgagggaattatagatgatctgtggttctggcagaggtgttgttggaaccaaaggtcagcatcctggtccgaacattgaaatgtagcagtgtgaatggtaggacaggatattttaaattgtgacagtttcagacatcacagggcctgagtttgcagtatatatgtcatcgcagctgtgtccctgagcggtatttttcgggcagcggcttattcattttgggggattgttatgggtatatacccttctttcaaaagtcagccggtacttatcaaaggggagaatgggtccattctttcattgcattggttaagaaatacttattgaccctgtagtggtgtgttagatactcaggagaaaaaccaagggatcttgtataccttcccttctatccccaccagcagcttcctggatgttaacggggaaaatcgagctctatttatttatttttatttttaaccttacatagcataaatttttgagcatccagaacagttgaaaaaataataaaatgaatgccacatacctgctatttaggttaaacagttgtttgtatttgttatacagtattttcttgtgtgtatgtataatatgtataagaatacatatttttcagtgaaccaaccattttaagttgcagatttaataagaatgcacccatagatttttcagtacatgtctcttaaaaataagacatttgcctaactaacatactgttattatccctaaagagattaacagtagtttcttaatctcagtccatattcagatttcttcagttgtcctcatgcaaatgtcttcagtagctttcttaaaaaaggcaactaaaatgccatttacgcgtgtcatttgatttctatgtctctttataatttcttttaaactagagctgttcctctatttgtattcttttttaaattgtgtaatttattttttagggatggggtatcgctatgttgccaaggctggactcaaacttctgggcttgggattttcccaagtaatttttttgttggtttgtttgaatgatagtgactttaaagagaccaggccaactgtcctataaaacattcccctttctagaattattagatttcgtttccttgtggtgctgtttaattttgttcatcacttgttttgcctacaaatttaaaattagttctaaaggtttatgcaggttcaggttaaacattttcggctggagtacttcattgggggtgctgtgtatatcaaattacattccaacagaatattgagctatgctgctgttggtaatgctaactttaatcacttggcaaaagtggtgaccactggattgttccattgtaaaggaatctttccccatctgcaattaacaaatagtctttgtattgatactttagcaatggacagatacccctttttcccaacaacctttgacctaatagttttagcacacattgatgacccttgcctgaatcagttatttcaactgaagacttcaaactggtgattcttttaaaattccatcattccttccacatttatagctagtattcttctataaaagggcagtttctttcatcattcattttaacactatcagtttcatgtttcatattttatataagtgtcataacaattactgtttctaatgtttccttacctggaggatgttggaagcattaaagtattcttgaaatctcttaaggtatattgataagaaaagtagttatggctcaggctgatggtcagagaggctttaattgtaagaggagggaggtaattgtaggcatgtttccttgtaaactaaacttcagtattcttttggtgaaatttggaaccttgcaacaacctctgtgcccctagctgtgtttctctgattctcatattgccactctataattgctagtaaacatctcacaaggttgatcatcagtagttgactggccgactcgagggggttgctgtggtgctctgtgaagctgcgctatcagggatcagctaataatccctgcctcagtccttgcacaatccagacatggttgatagtgaatgtcaaaatgagtgaatttctaaaagatagtttgggcttaatctaaaggaagcctgagtaactagtattaggtgccaatataaatctctgagttggttaatattattgtcccttaataattaagaaagggatgctcagagaagtaaagcaagtagacctcaaatcatttgcttcaagtaagtttcagagccagactctgaactctaagatgttttgtttcaaagccagtgctttccaacttgggttccctgctacttaagcccatgaaggagtttttaggctcagaagtccatattagttctcatctagaaaaccctgtctggtcgattccaggcccactgggggatctgggcctgacacagtatctacaacagagtagctgcactcagctccgttcagggttagctagaactctgaacagtcagtagggaaaggcatagcggagggcagatcgcatcgttcctgactgcccagccttaagggggggaaaaaaagattatatgaataatctattcagtaacatcctcagaattagcatgtgcaatttccttaaaaccaatgaggatttcctgtgaaaaggctggggtggaatatgccaattcacattttagcaacagcgtgaacactttcttaaaaatgtatagattatgttttggctttgctttttgtgcaatgtaggcagaatatggtttgctattatataaatttggattcattatagatcacattattgttccaaaaacacaagagctacatacagcgagattctgaaacaatacctttagcaggttcttaaatatgccccaataatttttcgattatggcatttagccctcaagtaaaatatatgaaacaacagaatatgtgctaggagcataggcaagttttatacaacaacagttcaggcagttagtgcataaaaagccattgaaattgctttgagatgatttatgagacaccgaagaaatggactcctagtatccaaattgaaatttcaccagaatcatgggattaacttctcttttcttatgaaaaccattaagcgtttttaaaatagcttctagcaattaggactacagttcttcatctttatgtttctgataggtgtaaagacaaaggggaaaaatcaattaatgactaaagaaataattgatttaatgctgaggtgtatctgatataatttaatgttgaaacgtatctacatatcatgtagagatcagtgtagctctatagcctccttctgtaagaaaggcagtatactcaaaattcaacatcaggatagtgtttcaatgtgaaatgacagaaatatttattgaacgtcatgcttgatattattttattgttgagagctttttactgaaactctttaaaactgaacccccaaattaaaatattggcaacactgaaagatagcaacagaagcctgtaatctgaagtaatggacttattaaggacttcagaaaaaaagactttagaaaagaagcatatatcgttgagtctgctgccgtgcctgatagtgataacctgcttagaattgaagcaccccattctttgaaaaattgtgtgcgctctgtggatattgacgtgggtttgtttacatgtgctttcactcacagatcaactgagcttcctaaagcatggacctttcatgttcagcgtgttgttttctaatctcatagaagtagtttcatagggaggagaaaacagaaaccgacaagaatatttctttgcatttgccttagcatttccaacatgcaaatgttgcttttttcatagtatggcacttatttttgtcagacatttcttgtacttaacaaagggcaaagttacattttggcgggagagcgactttcgcccggcacttcaccagatctcgttgaatagaatatattatcactgttagcattcttagggttcttaatgaaagctacataccctttatctccattttcctctccttttagaagacatcttccaatgaacaatttctatgacttgaataccagatatatgttattttcaagctacctcaaagccatgtttatatgcatttgcgacaataacaattccgtgcttcggaataattatgtaggagtatcattgaggttattaggcaggacccaccctctagagttctgtacatgggggggtctctgtgtgttggggttttactgtgcaagcacacagaatatcctgagctcatttgtaccatgataatgaacagcagggcactgaatctttttagttttattggcattgtatacagtaagttattaaatttcatctctgtaatatacctgcagtaaaataacaaaatattggtgcacttaaagaacatgtgtgtgtggaacaatgccctccccatcatttcagccccctgcaaacagctgcttacagatttcaagatccattgtatgtattccctcgagcccacctctaataatcgagacacatctgccattgcagtattataggcatatgtagttttattgaaaactatacctgtaaaaaaattaaataactcctgcctcaattaaattggcaagctaccttttgcaaagatcatattgcagacctcttgagacccaagtgagttcattttattcttacattacaaatcactaaatatgttatttttatttagctgagtagctagctttcctcgtactttgatggtaagttactttcatccattctcacttttgttttccttctcccctcatctttacatattaaaaaaattatgcaaattgcatgaagcaaacattttgagaatctgaacagaataaaatcaaagggaaaggaccctaacatgcagctttaactctgaagtgattattaaataaatacatgcaaaggttacaaaattggggtcaaatttataactcacgttgtggcttgtgatttttacaaacttctttgagatccatttgatcatcataatggtagaataggaagtaatatgaagaggaaatgagttagtaggccatacaaagcatatgcagatgaattcctattggattaaataacttaacacttactcttaagaaaataatagatacgagatctcactctatcacccaggctggagtgcagtggtgcagtcatagctcactgcaaccttgaactcctgggctcaagcaatcctccctcctcagcctcctgagtagctaggactgcaggcatataccaccatggctggttaacttttttatgttttgtagagccagggtctcacgttgttgtccaggctgtctcaaattcctgacttcaagccatccttctacctagactttccaaaatgctgtgattataggcatgagccactgcacccagccaacagtcttaatacttgttgaagattgagtcagtaatagatgtctgcaaaatagttttttatccaaagaaggaataagagtaaaatatttaccgatataaaaatgtgagcctaaacttattttaagttatgtaaggtatctgtataggtcttcatgtgagttaatcatgccaatatatagtgatttaaccaagaagaatttttttgctttatattttcatagaaaaaatccaaaaagacaagttgcccactatatgggaaacatatatgtgtatatatcgtatatatctgaattatgtatgtctatatatatgaaacacacacacacactgttataagacagtaagcaggttccttatctatagtttcttagttaaaaaaacaaaacaaaacaacattttgtgctattcagatgaactgtgtataactggaccgagggagtggttagaggtgaatactgtcccaaagtgaacatagagtcagaggaaagactctgttgaaagtcagaaagtagatgatttcataggatcaagtcacggataaatatgaggtgatgactgttatagagaaggtagaaaatcgaaaatcaagcagtgatattctttttttttttttttttttgtggggttgttggggattgggtctctatgttgtccaggtgggactcaaacccctgggctgaatcagtcttcccacctcagccctctgagtagttgggactgtaggtacacaccaccatgcctggcttgtagtagcagtattgacaaccagtcaggatagaaaatagttacatgtttaaataaagaatttccttctttgggccgggcatgatggctcatgcctgtaatcccagcactttgggaggccgaggtgggtggatcacttgaggacaggagttcgagaccagcctgacgaacatggcgaaatgccatctctactgaaaatacaaaaagttagctaggtgtggtggtgcatgcctgtaatcccagctactcaggaggctgaggcacaagaattgcttgaacctgggaggcggaggttgcagtgagcccagatcacgccactgcactgcagcctgggtgacagagcgagactctgtctcaaaaaaaaaaaaaaaaaaaaaaaaaagattttttttttttcttttagatgaagtctcactctgtcgcccaggctgcagtgcagtggcacaatctctgctcactgcaacctctgcctcctgggttcaagcgatgctcctgtttcaccctcccgagtagttgggattacaggcgtgtgccacctgggctggctaagtttttttttaatatttttgtagagacagggtttcaccatgttggccagactggtctcaaactcctgacctcaagtgatccgcccacctcggcctcccaaagtgctgggattacaggcatgaaccaccgcgcctggcagaatgttcttcttttttgataggaatgttgattcaagtcagtgagtggtcgtttggttccacttgggcttacctgggcccaggagactctgctcactctgtgttctcccagggtattttgtgccccactgctggttcacagagatgccaggtttcacggaatggagggctgagtcctagagagggtcatcacttacaagtaagatatcaaaccctaagggaatcagaatttaaagtcttagaagggtttcagttttgtcatatagaaaaatattgaaaattaaaaaatatatatattatgaattgtaaacaaactttttgatcaaaactcatgaaagttggggaatacaccttaacttgcaccctgccactgctttgaagtcccatccctgggatgtggttcactcctgtggaaatatatattatctattacatttgaactgtgaattgtgtttgtcacactgagctaagcagctcagaactgtcatgtgtagagtgactggtacaatacaacatcagtggtggtaaaagatttgtatggacaatgacatgtggcaaagaagaatgtcaacagctgccactgctatgacatcgtccctcaaggagtctttctgcatctctgccatgtaactgtctcagccaaagagaaggcactaacatgaacttcttccccagaatgctactcccaactagcgaccacgtaagactcgcttgagtcttttttgagggtgcaagtcctgggtgccatttgtcaccggaaagaacatttaagtttggagttttatgtatagagggagggattattctttgatttatttcgaaagaacatgttcttaatgtccttttgcagataatacacacaccctatcagtttttggactccagactgtctccatccatatgtcattatgaagcaggtttttatcttattatgatttaggtaattgtactagcctctaaaattttataatgtacctttcagaagctcatagatgccaagatcagaggctcctttggagttccatctaatatatcttccttagccaactggtacagataattttatctttcctctagatagttacacatatagctctagaaataaaatgtagttatcctaaatcagctgtatagagccttaaccagcaatcagaccatttagaacattcaacaataatacattctaccaaactctgactttctgtgttcagtagatatttattaggaaactcaccctgtgtcccactgaagatcctcacatgctctctaggtagatgacttcagctaatagtatagtaaccatgaggccttagtatttatgacttttcttttctttctttcttttttttttttttttttttttttaagagtcagggtcctgctgtgttgcccaggctggtcttgaactcccggccagagtgatcctcccaccttggcctcccaaagtgctgggattataggtgtgagccaccacatctggaagtatttatcactttccaaattcgtattcttacatgtgtttggatttatttttcaagaagccagagtaaaatttggcaattaccaaattgtgagttgagaaaaatagataattcacctttggtattgtgcttttgaatttgaattccattgattggatttcagtccgtcgggattagttcttccatctgtgtcccttggtgtgatgactgactcccagccaccatctgagactgctcggtctccctcatctccaaaagtcctcagtttccagatctcatcaattctgcttgcaagataccaataaatctgctgctgcctcctagacccccagtcaccaccgtggctgcccgtgctgctctgatccctctacccaccttctccctcacatgcctcctgtccactgctgctggagtgacagtctccacaaaacattgttccttggctttggggcctgtccttagcatggtggtatcctggcccctgtttctgcctgcagcctcagccttcgtactcaccattcacatctcatgttccagccctactgagctgcttgcagttccctcaagagttctttcacggttctctctgtctttataagaacctgaaatacctttgccttgcctccccttcttcttgccttacatctgttctaccagctaactcacctgctttgttcaagattcagggaccctggatgttataaccagggcagagcgagctgcctctcttctgtgctcaggaagcctttggagcacttctttttcctcacagtcatcacactgtctacagccagagaagggcaaaggctaggggcaagggctaggcttgccgtctctatctgcagtgtctaacaggggcacccaggaagtgcttgttccagagtcacaggatggatgagtgaatgaatgaatgaactagcaatagtaagaaattgtatgtgagcatgtaacttactatatttaaatacttccatgcaaatttcttgacttaaattaaccatgccaatgacccctgaggctggatttatttatttatttattttttgagatggagtctcgctctgtcacccaggctgaagtgcagtggtgtgatctcggctcactgcaatccctgcctcccgggttcatgccattcttctgcctcagtctcccgagtagctgggaccacaggcgcccaccaccatgcccggctaatttttttttgtatttttagtagagatggggtttcaccgtgttagccaggatggtctcaatctcctgacctcgtgatccacccgcctcggcctcccaaagtgctgagattacagctgtgagccactgtgcccagccgaggctgggattatttttaatccagttttattgataaagaaactgagatttagagagatttgttttcactctgaaggcagagatgggactggggaacaaactcctttggatccagatttggcattttctttgtcacttctttagcactggataaagttggtgtagctttgtgtcatagcaagtagcccacagagtcttttcatagatggttccagctctctattcattattaacttagggatcattcatggaggcacttacctagttaccaggctgagacctctgtctgccaatgagaaaaaatgtgcatttctaaagaggatatgaagaacctagcaatctgtatatcaggagcattgtctttacatagacaaaaaagaatattttgaatgtttcctgtaagtaagtaccagttgcaatagcgtggtgcgtaccgcccatgctatctattgcccatcagtggtacctctactctctggttgtggtgaaaaggaccatggtcctcctggaaatttctggccctgaagctcaggggagaagtgcaacaccagccacatctcatcccccaagtttcattctccttcactctccctggtacaacttggcagaggatggggagaactgggaagaagtggatgcattgagtagatcaagcttttcctcttcatgtttactttatatgattttaattttgtaaccttgttgtaggacataaaaaatgaatgacagtggacttagcttttatttataacattgaaatccttaaagatagaatgttagagtcagaaaggacctagacatcatctggcatccagtgccgctttgtagcaagtggaaaactaaagctcagagatgttgaggttggtcgtcatcacacagcaagcagaccttgctcagacacagccacacaatacaagtaaaattcctagcctgtaacacggaagttttcctttgatgtctttgtacccgctttcttccaaagagcaaaaggtcacctagaccatgaagtaatagccagcagcagccggaaacacatcctgaggaaatttctagacgattgtccctttgttaagctaccattgaatcatactgtcacagagccagagggtgtcgtttgcttgtaaatactgagtttttgaaatgtcactgtaacactggaaaaatgttgtctctgaaggttgccaaagtgacagaatcccgacattgtaaataccagccaacacaagtgcttataaatgacaggaataaaatatacttgactaaatccataataatcactgataacactgtttaccctcagtgaccaggagctgtgaacttggataaaaagcacatgtgtgcagatatcattaatatgtctgagcctctagccattccagaatattttgatggaaaagctccctaaatatgtaaaagctttgcaataactaagaagctagtgtgtaaggtagggtgtcagtcgtccctgatgaaactagagagagccttgactatcttcagcccccagaggactgataaggcctcccttgttctggttagacccaaactctgagccaggctactagggcaggcaatgctgtattttcagtagatgtgattctcagaaggcccatttgccagaagcatgagcccacacctatatcatgttccatggagaaaatgtggaatgaacttagagattaaaaactttggagccataagtgggaggatcccatgaactaccctttgactttcaaagggtggatgggtggtcagacctttccacagtcctaatactctatagcccaggctttttcttaataataacttcctcctctctagaaatgattctctccctcttttttctgttctagtgtaaaaatggtgcctgtgtgtatccgagtctttaagaggaaatggacacattggcaaaccagtgcctcctttggctctgtgatgtggctgctgttactactcaactggagcaccccttatattccagtctccccagaaatgctcaggaacagtggagactcaatgacagagggttgagccctcctggtttttcaactggtgaaagagaaattcagatggttaaggagatagcagagtagccagcactccgggagctgctcttatctctgctatgaggctgtgcatggggaagagtagggctgcttggaatgacctccttacttttcatatattgaaacatatttctttttccttgatatgctcctgtattgtttgaattttattttattttattttttgtggtaagcattgttttcttaattaacaatgaaaggttgtagtcaataaactagtacttgatgagatttgagaaaaactacaaaactgtagattgcaagttggcatttgaccaagaaattatgattgtgctccttggatttttatgcttaggaaagagtgcacaagagggaaaaagctttcggtcagaagatacccattctagtactagctggaatggtggtaaagaatacgaaatggtctgaatgtccatggctgtgtgatattggcgtattttgctgtccatgggtctaagtggatggtattatagctttgaaagagtcatggcaaaggagggaacaggtgtgtcccaaaccctaatgaactcagcagattggcctggcattctggcaatgtagtcattcagcggagccgtggggactccctgggtggggacccagcatgcttctggaggtacctgggaggcgctgggagtagggcctgctgtactggtttgactaatgtggtgtaggtgttgatgttggagagttggtggccagtctcaggctctgttctggcactactccagcttgttggtcatgaatgcagattgagattgaatggctccttacatttcccttgaagaaaggcagctttgtcttccaggaatgagctgatggcagtggccgtgtggacattctgcagctttggcacccagtagcgatggcctgattgccttgaaactgggagcctctagggccctgagaacttgagcagggctggacaagccttggagcagaactttgctgtgaattctttcattgactcgcaaaagatgaaggactctaatccctgatatctacctttccacttgacctttttagtcttcagtggtcttttagaagtaattttacctggccgcggtggctcatgcctataatcctagaactttgggaggcctaggcgggcagatcacctgaggccaggagttcgagaccggcctggccagcatagtgaaaccccatctctactaaaaatacaaaattagcagggtgtggtggctcacgcctataatcctagttactcgggatgctgaggcaggagaatcacttgaacctgggaggcagaggctgaagtgagccaagatcgtgcattgcactccagcctgggtgacaagagagaaaccatctaacaaaaaaagttattttatgaaaaacatttggaggttttcttttgggtatggcaggcagattggcctcttatttggcataggtgaagaagaagagttgaataaaagtagttggggcatagaatggccatgcaagttcccaactaaatcagggtcaagtttaaatgtatttgtattttgttcaaattcatctttatctaaaacaggctgatgctgttttgtctctgtgctgcaggtggatagccacaaatttgactctatagttaccagttatccccctgccaccccttgtttttcttcctgatttctctacttccaatcagctgctcttttagaaaccaatagagaagtgagacggggtgggggcagaggaagagagaaagggggtaagggggagggagaaagaggaaagagaggttgttttttgtcattagtgagtaaaaatctgtcgggctcgggtagtttcttagtgaattcagcatttagtgattagattagaggggtatatttgagctgaagattttgggaactcacctttctgctctacagaatccctaggtttctcctttagctctactttctgattcattccatccccatccactgaccccaccgccaatattgaggtacttgtgaaagctcagaatctccagtgtcctcaaggagctagccccaaagtgccccctggtggctagaggagaaaaagacaagatggaggatgggaaaaaggtcaggtggatggataactttggctcttcttttggctcttcttttctgatagtatttttgttaacagcatctaatgggttgtcttctttcagtatcaatgtgaaccagctctgaataggttagtgtatcaatgtatttccctttttgggtgattttgctgcagggatttctttccctatgccagtttttgttggtctgatttttgtttctaggcatattgcattgacctgagccttctcacagtactgatgacactgggggtagggagaacaggagcagttgaagacgacacatgctgtcacctcatgtgctggtgtgagtggcgcagggaagggctgtgattttttataggcacactgattagccaagcacttgtcacctccactgccgctcattggcctactgagtgtgagcgtgccatctaattgacagctgtctgttgtcagagggccatcttttctccttttcagtttgagtgaacacaacagagacatctgcagagctctctgcagctctgacaaggttgccctgcctgccaaccctcagacttctaggcagcataattgaagagatcagaaaagaatattaacccgttgaccatcttgggctgaggtgtaatgaccaaaaagtcactttttaaggtgactgtgagtctttcttagtagaggaagacatgagattctctgtcagaagagtcaggccagtaggaagtgctatttcttggtagtgattgttcgtggggtttcagttcatctgagcacttggaagaggatgagaagttcattttcaaggtagacccagtgtttcatggtggggttacactgaagcctgaatgctgggtcacatcattcatgtctgatttggcttgtgtaatgacagtagtgctttggatgtgtgtagtttggatgagggttactctttttcttttaccgccaggcctgacactgcccttttagcgtaagattccagaatctcttatgcagtagcatggaatgtatggccaaccccgtagtaacgtggactgcctctttgggacatttcctgtaagccagagatatcaaggtggactttgtgatgggtagattgtttattatacagatatcagcttgggaatttgaatgtttaattatttgccttgtcgtagtgtcttcaaatgaagctctatttgagcatctactgggattggtacaatatgcagacaagctggctttgtgtgggtcgagtcacctgtgcttgcaggatgggggtgcttgctatatttggaagtgatttagtggtatcctaggtttatcaggaggaaaatacatctttgcatttatttgaacatttgatttagaaagggacagtgtgtgggtattggataaattgcttttactctttctttgctttgcattgttctcccctctgatgatttgcaacttagcaagccttcatcattgaacctgggtgaaaaagaagatctgagaagccttgagtaatttgtttcagactgtttatactctagtgttttacagatgtgggcttatttgaggaatagtattggcgaaaggtagcgtcattaaactggttggagaaatttcaggcaagtagatagagaaatttcaggcaactccttttccaagttgttgctcacagattataatagatgaattcagcagaatgttctgacctcctagactaggtcagataactgagttcttgtcctaactcaaatcctaagtagctgtttcttaaagctctgttctgcctctgcagaatgaaggcttggcctatatagtgtatgagattccttctagcttcagggttttgtaactatcagaataggtaatgaggaaggagactatgccctggtagcctttagccatatcacaaatatttaacatactcccaaaatagcacatacaagacagaaattctttgtacttgaagggaataataaatacagaaagcatttgagaagtacacatttaatttctgttaactctttttttcttatttatgtttattattagatgataaatgacttccttttttttagtattaaaacaaggtgatcaggatagtgagaggattgggtcaggtgaaacacatgactcacctgcgtgcttatgattccccttggaagatggttttgggtaacattctgggaaaactatggataaagtcataggcttccatatttaattaattctaagacttttttttcacatttcaacatctcagaaatttatggtatgccaattcaattggcaacttttttcctctcttggtaggaaatagataatgatgtttttgacattcagtggcatcttataggtgatgaaatacaattctgaggggaggaagcaagatttttttttttttaactgagaaaggctacgtgactaagtgacttctttgtttcaatgctgactaaagctgtgatgtcctttttaatcactttgaaagattcaaattgctttaggaagacaattcatgcatggagctcaccctcccagaactccacacttaatgcccactgaggaaggagagaaatgcatgcaaatatatatcccaatatagaaggaatattctagttcagtaacttccactcctgagcttttatcaaatttttctctatagaattatttttgttttattgtatccaaaatgtcagatatctttttcaaggaaggtcaagggactttgccattttctaagccagaagtattctcacctagtccagtactagtcaaagtttttagtaaatcacttagaatttccttttttaaaaaaaaaaaaaaacccttctagagtttgttgataccttaaagatcatcaaatccagctccttatttcacaaatgagtaaaaagaagacataagttgcttgttcagagttcagctaggaactagatagaacctgggtagcctgacgctcccattcttgctgctaaattccatgcaatgtaatgaaagcgggattgagtataaaaccgatactctacacatcttttgttgatatttctgagggagaaacttgaatttctgtaagtgcacatagctggtttccctttgctttgtatttctgaatgctacacttgtcttctgcctactacacttaaattcataggtgatttcacaaggcacagaagcccaacttgtcacatgtggtttaatatatgccacactttatgctgcagtagcaccatttggtcatatttagtgaactctgtggttgttgagaatgccaaagcagcaggctcagctattgcagcataggcctgtacttagttagcaagcttagcttaaaagctgtcagtgcagctaatgttacagtggcttactgagaccttggcctggttgtgatagttctccaaacctgggtgttttcacctttgaaatatgaatctggatttagctttttcttagaaaacagcaacaacaacaaaatggtgaaatctttaagctcgttaatgtgaatgcagtaagaatgtaaatttaatacatattcacttattattaaatgctgttgtaaataacatttttagatttaataatgatttcccaagacatttcgtgctattctttactttgaaactgatggggtgagaagagagttgaatcttaattattattttttagttaattaacatgtgatttaaaaaaatcgagatatattttgtgttagaccctaattagaaaagatgtcaagaataacataatgctaacttaattttaaaattgataaatgagggcaagatgattggaaagtatcctctagatcacacaggaaacgggttaatattcaaatgaatagctctgaaacgctactttcctaccagctcctgaagcaatttagtttttaagacctaaaactgactcacaatctgtggtatgaaggatagatgttaatagtttaaatatttaggcattgcgtgggctgtttgttaaaccattggtagcttgagattgaccacagtgggagtgttttcaccatgcgaatgagcatccctgctcacagtggggcatgagcatagcactgcaggatacggaactgacatttattacatacctgacatttccgttactcttttatttatcgttttgggctgcttgtttgtgtcctatccccactccccaaattcatatgttgaaaccttaatccccagtgggatggtgttaggaggtgaagcctttgggagatgattgggtgatgagggtggacctccgatgaaggaattaatgtccttataagaagaggaagacacactggggcctgtcagcggtgggggacgaggggagggttagcattaggagaaataccggatgtagatgacgggttgatgggtgcagcaaaacaccatggcacgtgtatacccatgtaacaaacctgcacattctgcacatgtatcccagaactttaaagtataatttaaaaaaaaaaagaaaagtaaaggaagagagctagccagccttctctcttctccatgtgaggataccacgagaagatggtcatctgtaaatcagaaagaggaccctcgtggtggctcacacctgtaatccaagcactttgggaggttgaggtaggaggatcagttgagcccaggagtttcgagaccagcctgagcaacacgatgaaaccctgtctctactgaaaaaaagaaaacaaaattagccagatgtggtgacacatacctctgtagtcctagtgacccaggaggttaaggtgagaggatcagctgagcccggaaagtcgaggctgcagtgagccatgatcatgccactgcactccagcctgggcaatagactgagaccctctctctccccaacccctccagaaagaggatcttgtctggaatccagccattctggtcctgatcttagaattctagcctccggaactgttagaagtaaatgcttgttgtttaggctacccagtctttcgtattttgttatagcagctaaattgacttagacatcattaattatgtattttaagtcctgtgttttagcattctggaatgagagcattgaaaatgatcatcaagccgagtaaattaactgaattaactattccaccaaaaaaaaccccaaaaactgaaatgttcgttgttcctggggaatggctatgcacttggaggctggtccccttcctccctcctcttcttcctggtgaatcccctgacttttctcaatcaggctttctgatgtggaggcttcctctgcttcccagggacacactcccttcccagggctcctggagctgctgcatctctgctaccctgagatgtaattcttgcctgagatttcagctcctcccctacacttcagaggcttcagtggactatttcttattcatctgtgcaggcacattgtccaatgtacaacctgctcaatgggcttgttgagttaataaactactctgtgttctgtattatgtggatttagatgttttgcttctttttcagccttcctttcgcaccctccacctacccgacccctgctaagatgctaccttttaaagaaaagaaataagttcttcacacttttctacatttataattcaatataaataactgctactggtatacttaatcacaattagattaaatatgttctttgaaacagggaggtcatctaatgaatagaagtgaaatatgtcagaaaatgtcacataactgagagtgtgacatctttagtaaatagaatgttgagatgattttagtgctaggctagttttgtaagagacatcttatttgacacctttgttcaaacaacttttgtggttctcaaactagcctctattgaaaagaccaagttccctacgtcttctctttgaacactttcttctttgcattaacctgttcttgctagtgcgtccaagtgtggaaagcaaagattagttttaaatcttccgggtcaaaactgttttggcttttttctagagctgataataagtagtatagttttctgtgtaccatgtgtaagagaagagaaaaggtctgactttatgttagataatccataattcggttgctctgtcccactatatggagaccaaagtcacactaaatggatgccttgggtaggggagaaggatgtagcctttcaatcagacttcttagctgcactagtcacatggctagcctggggcaggtatttaaacttgctatacctaagtctcctcatctattaattgacattaatatcagcaccttcttcatagggtttgtaaggattgaataatttaatgtatgtaagacacttagaagagtgtcttaaataatgtgagcaccttcttcattaacattagcacatatttcatatgattttgtgaggattaaataatttaatgtatgtaagacacttataagagtgtgttaaattacagactgtgctcagtaaatgttgtctaatattatttttaaactgatggttattagccaagctataccatatcttcaactttgggtgcacaagagtgggcagtatctttgaagaggtcgttgtttctcaatctgtgggtcaagtattcttagggaaacttttcattttggtccaactcataactttagtgacattagtctttgcaatttcctgctgagaagagaaggtagcctttctattttttttaagttttcaaagcctaattttatattaaaagaaaacaaggtattaaaaccacgtatttcttttaacttattaaaaggaaataacacagtaacattaataaaaagttacaaaatggcacagtaacattaataaaatgttacattgtctttttattctatagcgtgaatggaagaaataaagtaacttttctagagctacaaagtagttaatggtggcaaagattcactctctggcaatgtgtcttgtttcacaaagtaatacaagttcaacacagtatagaattgcctttgatttcaaatggtaacagcatttattggattatttttgtagatgttcaatgccacaagtaaaatgaagttttctctttaaaaggatgatagatgtggcagacccatcactgggtccctggacagtggtaacatgatggggtttaaagtcctttttgaaatagccaggttaatctgcataaaggctatggtgcttcattaagctttttgaaaactttctggggtaggccaagtggctatttgtatcagttaaacgtaagtacaactacttaaaataacatttcttcccacttgtgcttgagtctgggtctatatttttcctgataataacaggataaaatgaatcatttgattccatattccaagaaaaacgtgtccattaggtagaggaagctcttagaaattatctccaagagtggcttgttttgtacctgtcatatttattataaggtaaagggagatgtagactggtgggggtgatggtagtaaattgaaatgagttgccagctgtgttgcccaggctggtcttgaactcctgggctcaagccatcccaccagagaaggttcttaaaccttttgctttccattgggcatctttatctacattttacctcatcaagctcatcaagtgaatcagacgctttgactcagtcataacatgttgatggagagtcacttagttggaaaatatagacaagaagatgggctctgggaagaactggtaggtaggcaatggctctgaaagtgtggggccctggtttacagtgtaatgacacccaccatttagtgcctcagccattattcaagtgtgctgtgcctttcctactggccacgttaatgagagggtggagatagcaagttcctgctgaaattttcacaggaaagctaagcccttaaatgatgttttgaaggaatggtttctctaccatctgtaaaaaaggcttgattaattattttggtggcagaaactatatgctgtgcttcaggttaaacagcaggaacatattgaggttcttgggaagagttttcctacagccatcaaataggtgtccacacaggttaaccggactgtgcaataagaatgtgggacattggcatgccagtgtgaagtctggaaaagtcggatgtgatatatgcaagtggaagagaactgaaactatgaagagtcatttggaaagccccagttgtgagtttgtgatagttgagaaatggcacctcctctttgcatacttaggtttgagcaggaaacaaagaagtgacttgaagtcatgttatgaaaagaagaattgggttggaggtcagactctggattctagacctgattctgagttaactaacattttagcctagtttcaggcactccccagtggcccaatgagccaccccttcttgcaggcctcaaaatgcactgtgataaaactgcatagtattttcttttccttattttcatgttctaagaaatattattgtccgggcacggtggcttacacctgtaatcccagcactttaggaggccgaggcaggcagatctcttcagcccaagagttcaagaccagcctgggcaacatggtgagaccctgtctctaataaaaatagaaaaagacaaaaccctggtgtggtgatgcatgcctgtggtctgagctactcaggaggctgaagtgggaggatcccttgagccctgggggtggaggttgcagtgagctgagatcccgccgctgcattcaagactgagtgacagagtgaaaccctgtctaaaaaaaaaaaaaaaaaaaaaaggagaagaaaatataataaaaataatacatggatactttcttaaaatatcagacacttgagaatgttgagtaaaatataaaaggacttaatctggagatcattgccttagttataacatagaacctttctacttaggagaatttccctctctcctactccctatttgtaaaaattttcttttgtggcttcagtcaagtttcatacttttaaatgtttttgttaattttattctttgtgtttttttcctaaactgtatttttgttccattatgattttttcattggttagctgaggtataggaaagttgtcttttttattgtctgttaatcttataacccgtaactccagaactttcttactagcctctggtagttttttttagttgtttaagattttttaggaagaaaatcattggcaaatattgggagtgttgtctcttaaagtgtctttctgttatattttccttgtgctagtacattggcaaagacttacaggagagtgttaagagaatagtggaatacaggtcagcttcgcattttgttgacttgagcaaagaatcttctagtgtttcattattaaataagttttctgtaggcatctagtagattaagaaaactttcttatgatccaccacttcttaaaatgaatgtgtgtgttcaaactaaagagatatatgtatatagtagaaatatatgtgtatgcttgtgtgcatgtgtgtgtataaactttaaatcatcctctcaaaattcctgaagtaaaagtctattttgttgttttatgtggaattttattttatttaaatttttatatttatatattttatttaaaattttcatgaaatggccaagcagggtttaatataaaatggaaacagggtttatctcagaaatttggtggctaaattccttgtatcccgtcttatctagggatgttgtttgtttcaaggttctaccttgagaggagcctgtcattttcttttttgtgtgctgctttgcctagttgacatcttggctttatgtgctcctgttgaatgcattgggaaattttctttcttctttctatgtcctgaaatagcttatataagaggggaatttttgatatttgggggaaattgcatgggacttttttttttttttttttttttttagacagggcctcactctatcctcaaaactggaatggagtgcagtggtgtgatcatggctcactgcagtctctaccacctgagtagctgagactataggcacatgccaccaatcccactaatttttgtatttttttgtggaggcggagtttcgccatgttgctcatgctggtcttgaactcctggacttagccatctgcctgccttagcctcccaaactgctgggattacaaatgtgagccaccgcgcctggcaagactagtacttcagaactggattttttactaatttttccatttctgtttctttgtgtttcaattgtgatagtttttgttatcctagaaaacatccattttccagactttaaaatttgctacataaaattatacatactttctcttgttttaaaaaactccttatctatttagcaaatatattttgtaattatgttgatttctgttttctctcttcttgtttttccttacacttgccagaggtttgtgtgttttctttggttttttttttcaagtaccttcttttggtttcattgataatctacattttgttttatctaaatttagtaaattttaaattttattaattcatcatatttaaatatgttgcactttttctagctttttatattgtatgttttgttcatttaatttttatttttacatcttgcaatttaaggccattatttttcattggttacagctttggctgcatcccttagattttcttatatacagctatcactatcatttatttgtgtattgttttaaatgttattttgcattcttgtgtagttcaagagttacttaaaacactgttttcacagtcccactttaataaaatgtttttcatgttggcagtgctactgttttgtttttactatttaattttattgcattctgagtggggaaatggcatggatatttcctactttgggggtaatctagtaggatttttaaaaatgcttagttttttttaagcatttcatatgcatttgaaaataatgaatactatttccctattttattattattattattatttttgagatggagtctcactctgtcactcaggttggagtgtagtggcacgatctcagctcagtgcaacctccggctcccggtttcaagcaatcttcccacctcagcctcccaagtagctgggatcacaagcatgtgccaccaacctggctacattttgttttttttagtagagatggagtttcatcattttggccagcctggtcttgaattcctgacctcaactgatcttcccacctcagcctcccaaactgctgggattacaggcgtgagccactgcacccggcctattttccctattttaatatattaaaccttttattacttattgtccttctaattgatttaaatttctgagagatatttgttctagtcttctactttgattatggatttaccaaccgctcagggtatttatattttaaaaaatatatctcaaagctgtatcataaatgattagaagttcaggaatattttatatttttggtggactataggtttcatcagtatgaaatatccaacttttttctttttttacatttttgccttagattggctttcaatgtatagtaatgttctctacatgctttatttttgtagattttatattacatattttttatatatttttatttttcatagtctctgtgttttatttttgatggtttgttatacacagcatttagctttacatttttctagcctaatgtgacagccactgtaacttagttgaggaatataatatccaaataaacatagtttaattttctttttttccttggcttgatcacatttcctttgttttatattttttgctgcttaaaaaaaggtctttttttttctaatggtgcaggaattatacatcttatttcttgtgaaagttattcttgcctttctaactcacatatttcaaattatatatctctattaaagtctaaatctgtttggtgtctgtatctttcctaaaaaagatgacggagagtgttagcacatttttaattactgagtttctccctttgttcctcccctttacctctcatgttgaggttgatatgtttcctttttgacgttttaaattgcatcaacagtcacatagagtctactagcgtttccttgccccatcttgctaatttttgtggaccatgttgttctgggtttttttgggttgatttgtcattatacagttatatatccttatgtaatttttttcagaagtgtgggggtataaattttcagagtctttgcattttctaaattgcctgtagttagctcacctttttgaaggcaagtttggctacatataaaatttgagttttaaagtcttgtatcccctttttctgtcacatttttgttctggcttgccttgcagctctaaatgtagcaccccaattaatcacccgattattgcatcacactccactccagctccatgtatgtattgaccctgggattggagcatcctagatttagctgtttctttgcagtcttcttgattggctgctgctttttggcttgtgatttatttatttttcctctgtagagcaaatccatctacttttatctttaagaataattcaaaattgttattccaccgaagctactcttccttattttctggcactatttggcatgtatatctcttctaaattcacacacacacatacacacacacccagtatcatttatgacatatgaggttagaggaaaagtagaagcttatgtttaatctaccatcccaagccaacccctttatatggaactttacacattctaaatgctttcaaatacagtaccttataaggaaggagatgctattattctccttttataaattagaaaactgagaggttataagtcattttatttatttattctttcatttatttctccattaatccattggctaaatttgcatcatctgctatgtataagcagccctcagtgccagagacacaaaaccccagcttccaggacctcacagctgagagtggaagcaagtgggtaacaatagagacttgtgacaataatttcagcatagggtggatttcagttccatgcatgtttgagacacgtgctaggtgcagaggaacctggggagaggcgtctctatgtcagacttcccagtggaagtgttgaggagtgtttcccagcggaagtgttgtcattgattaaaatccatgctgtaaatgtaggcatgagttgactgctgtgctcttggtatctagtaaagttcctggtccctggttggcacttaaaaaaaaataagtgaatgaacaaacaaagcttccttggctctcaccgaagcactccttttgtactaacatatgtgatagtctccacaggcatgatttctttatttctccaagcatctctttgagtaggtacagtgaatgtctcctgtccacaaatgaaggggccaaggctgtggggagttaagtgtcttgtctaaggaggcttggatcccaggttcctctgactcccgacaggcaagactcctactggccctatggccccctcatccagattattttagcctcttttttcaaactctttcctgccctctgatcatgtttctaccaagaccaagtatcacaaactaatgaagaggtataactggctgcctcctggaggaggtattaagaagcatacagtggccaaagtggaggaggaataaaaatacctccagagacctcaataataccaaaatagctagtcacaccatatatgtctaagctttgatacagcctttctacatgacatgttcatttggaattatattagacattcaggtttgaatcagggcaggtcacttgaaatgtctcaattcaatgcaaaagttataagaaaaataacatttccccccacacaagtatatagcatagtataaaacattctcaaaaactttgtaaaggaaacacattttacagtttaactcatacctacttcacttccttctccctctcctgttctctgttcattatttccctacttactaactggctcttagttaatattttcgtggcctcacccccacacctttttagttggtctcttttttgtgcaaattgattttattcctatctaaggagatgctttcatcctttttttcatgctttgaggcctcattagatcactgcactctaattttgggggggagagttgtcatttgcactatatgtacagtctgagcatcctaaagttcttgttctgagaaaaacatcgccatggtgagcggcccattttgaattaggaggactggctaaggtgctcacttaagctctttgtagttttgttcagtcaattgagtgtttctatgttacatctatctgtctatatgtctgtctatctatctatctatctatctatctatctatctatctatctatctatcatctgtctatctatctacatacctacctacctacctatgtactgagcccaggctggagcagtggtgcaatcagagcttaccgtccccttgacctcccagactcaagtgatcctctcacctcagcctcctaagtagctgggaccacaggtgtgcaccaccatacctggctaattttttttctattttattttctgtagagactgagtcttgctgtgctgcttaggctgctttcaaactcctgggctcaagcgatcctcctgcctcagccccgcaaagtgccgggattacaggcatgagccattgcgcccggccttctctttttaacgtaatattgagattggggtcagactgtgctggttgtgggtaaagctattgcagccttccagctatgaaggcctgccctccacgatgggatggccaggctggtacctgagactagtgttggaggcagtggcagcttccctttgatctattgcagaatgcattttcaaacacacacacacacacacacacaaataaaactctgatgttcactttttaattgaaagctaaaaatgcccagctcctttctgcagattgacaagctgatatttcagcagtagctaaagaacccggtttagtaagctactgaattttgacgtttataaacatttaatgaatacatttttatttatgtcagcttaaaaaatacagctgctgatatctgcgccccccaacaactttttttgtcttaatgccaaaattagaatatttaaatattttaaaatttcctgatgagcacctgtgcaggtgtgagggcagcatgaattcacagggagagtgtatgaagttggttatcttgatgtgcttgtggggaatgtgtatttccttgcaaggactgtcatgtgctacctgatcctctttcatggacctcagccactttcgcctctaacttgaaaaggaaactggcattgtggcacaggggccaaagggacacatttgtagccttgtcctcaaatcaagtgggacttctggttctttctctgaccatctgcttgaccttcagtctggtgtctccaaggagtgtgtctctatggcagtttaaaaaattctgttacactgagaaagagacaaaatgtaaatcttaaaggaatcagtagatttttaaccccactgctggtgttgagaagacagtttgagtcttaatctctttccttaagtttcaaaacatgtaggatttatgttattgacatgtcaaactttttgtacttattcattagggaaggtttcaatacacacaaaaatagagtattataagatgcgctactatgtattcattatccagtttcaacagacgtcaccattttcccagtcttttgttatatagtatccccttcactttatgttcctgaaatattttaaggcaaagccttgacagcatattatttcacctataaatatttcagaagcatctctaacaaataagccccctcctttgttttacatagccatggtgccatatcacagctagcaagactattaggaattcttaatagcattaagaactgacgttcctcagttgtctcacaaatgcctttttacagctggcatgtttgaatcagaatccaaaccaggttcacacgttgcatttgattatcatgactttgaagtcttcttaaaatctacaacatggccagtctccctctttttaaatatttaaactgggtccattttcctgtagaaagcccacattatggatttggcttattgcttctttgtggtgtcatacaccatgttcatctgttctccatacttcctgtaagctgatacttgcatttagggcaagcttgtctaacccatggcccacaggacacatgcggcccaacacaaatttgaaaactttcttaaaacactgtgttttttgtttttttgttttttttaagaagaccaagtttgtttgcagtgtatgaatgtctaggtgaggctgggttaatggggagaatgagactaacataacatctataactctcatgactttttgttattgttgttgtttgttttgtttttggagacagagcctccctctgtcacccaggctggagtgcagtggcgcaatctcagctcactgcaacctccgcctcctgggttcaagtgattctcctgtctcagcctcccaagtagctgggattacaggcacgtgccaccatgctaatttttgtatttttagtagagtcggggtttctccatgttggccaggctggtctcgaattcctgacctcaggtgacccacccgccttggcctcccacagtgctgggattacaggcatgagccaccgcgcccggctgaaaacactatgaggttttttcatgggtaatcttggatatgttatttgcttcattcaagaagtagtatgtggccattcatttctcaagatgcttagattgttcagtgagttcatgtgctgcccaccagatctccctaatacagagttttacattgtctttcacctgtttgttttaggatctattgatgattatttcattggaggttgcaaaatagccataagtaaattggtttaatgaagcttcttctccctactaaatcttatctagagtttaactatctattaatcattcatttttgcacatttttacagcttttgtggggtattttacattctttcttctgtttgaatatagagggtgccttgcaaacttcactcatttcactagaagaggcaactgtttaaatcctactcttctaatatatttcctggttcatgttttcctgcacattcataaatgaggaggacgttgatttgtcagttatcttcagtgcttagaatagttgctgaaatgtgacaagaatgtttatggaagaaattaccttataggttgtacatgtcctctaaagacatcataggcactcctacattgcattggtgaaggggccaccaaacagcagaatcctgcaacttggttgaactatgaaaatgttcttgatacattataatttcctcaacccctttagccagtattggccattcaggcaaaggaatagaatttccaagacttgtactgtatgtttgcagaaggagggaggatggcagataggtttgtgtgtgttgggatggagaaagtatgcaaataagctaattaatatcaattgtttttatatctatattacacatacacacactcgcatacacataagcacacataattaatcacacccatgagcacatgtacacagctggtctacaccagattgccctgacaattttagagctgtgtgctgaaaaattttagaggaatttggctttgaatgtgcaacacgtattacagagcaaagatcaccttgggtcctaagggagatgactttcatctctaccatgtgagtaaaacctgggtgattgaaccataaattattttgggtatatagaactttcttcaaataacacttaaaattaaatgtccaggtaagtgattttcaaatcagaacaaccaaaattgttaatagttatgatcatgcttatatacgtatggaaatgtatatgtatatggaaatatggaaatttgtgtataagcatgctctgcagtaaatcaaaaaatgaccatggagcaaacatatgaaaatgctcaccagcaatgaaaaaaatgaccctatggcaaacaataaagtaaaatgctacactgtcttcctgtagaggacctactaggtttggacaaactggctgtgctcaaatacatgtgccaaaattgagcaggctgggtgcaaatattctaagggaattgaaagacactttttcgtgaaataggtttaggtgttgacattatctctaaaagtaattaaaagatgattgatgtagtaaattttcttttaagccatgcctttaagcacattgtaggaaaaggactgttaaacaccacattttcttatttagaacccttggggccataggtatttcacaatttaagaatcatttgcattttatgaagttaatatggtgtatataacatgtcctgtgtaactctccagtgaagtctgaaacagccgcaatgtatatatagattattatttctatagcaaaacatatgaatagatacacctagtaagacaaaaacaaaaattatagatacgtagatattctcacattagttcaggttttgtcacaaagtacagctttcaaaccttctggaatttttcaattgagggaaagattgtgaaccttcaaatgaacaaataaataaatatctaccttttctgaagaaaaacaaaagccaaataacaaataaatcaagaatcacttttcatggtttttaaacccctcaaataaatgtcttccttctttcagttcatagaagatttagaattataaaataaagaaggcctatccacatggtctatatatgtcttatatatctatatctatatctatatctatatctatatctatatctatatctatatctatatctataaacaattttagaattagctcgtcccacacaaaaatagtttttttgttgttgttgttttttgttttgctttttttgggatggagttttgctcttgttgtccaggctggagtgcaatggcactatctcagctcagtgcaacctctgccttccgagttcaagcgattctcctgcctcaccctcctcagtagctggaataacaggcgtgcatcattaatttttttatatttttagtagagatggggtttcactatgttggccaggctggtcttgaactcctgacctcaggtggtccactcaccttggcctcccaaagtgctgggatcataggcatgagccactgtgcccagccaaaactttagatttttatcctgtttgtgcctcaaagcctattcagttgaaaggctgatgggctcgctctgaggtccattgttggctgggggagagcattagggagctgacttttggcagatgaggaaaacagcatgatcactgcttttgccactctgctttgtggaattgacccactctgaagttgttctcactcgacagcaatgcaggcatttatccagtgcttctacaagaaataatttgggcaaaagcagtaaggaagtaagccttaacagaaaagtgggacccagcaataggagaatctacacatctgctaagcccagccatcatatatatatgtgtgtgtgtgtgtatatatatatatatatacacacacatatatatacacacacacacacacatatatatacacacacacacacacacatatatatatatatatatatatatatatatatatattttggagatggagtctcacactgttgcctaggctgaagtgcagtggcatgatctcggctcactgcaacctccacctcccgagttcaagcaattctcctccctcagcctcttgagtaggtggcactacaggtgcatgccaccacaccgttaattttttgtatttttagtagagacagagtttcaccgtattaggatggtctcgatctcctgaccttgtgatctgcctgcctcagttcccaaagtgctgggattagaggcatgagccaccatgcccagcccttatatatttttaatgtgcattagtaaattataaataatgacagtctccatgtggaaaatgaaaatcaacttagcttatacatttttaaaaatcagtcaagtggtcttgtctcatatacatagaccttgaaagatttgttttcagtacattctgtagaaggctcttgaatatctgatagactcccctggcagctttcacctggtgtgtgcatgcacagatataatcaccttagtctttatcctgcagtaaacaaagttcaagagagatttctgaaatgaagataatcttcattctgccttttgccgctacctaaagttcccttggaggactctgtgaagttactcaggttatattttttataacaaatataaaccacagaatttgccagaatgagaaatattctgatgaacatcatgatttgactgaggatggaggaattgtagggaatggttaaacttgaagatactttttagaaaaacaggtcatgtgctacagaagctacttttaaaaacatgctttttcattaaatgtaaatttaccacattattttatatatcttcattaatttaataaaactcctgctaggcttttgtaaattttcacagatataatgttaccataggcatctatgcacatgtatttttgtacacttgtccaatattatccatagagttaaaatttttaacttgaaacttctaagtcagaaggcatatgcttttaatattctgcagtacattttaacttgccttccagaaagtttataccagattacattcccattagctatatatgaaagtgaacttcctcactggcagttgaaaatttgtcttattttaatttgccagatagcttgtcatatatttattgccaaatttcaaattcattccttttataaaggaatggttcatgttcttccccagtctatttagttttattcttattacaatgtaagagcttttcatttattaggagtatcttctcattaaatatttgttaagaaagatttttgttcaactttgtatggtttggataatgttttcatttatttttatttatttatttatttatttagagacagagtgtcgctctgtttcccaggctggagtgcagtggcaagatcttggttcactgcaaacttcgcctcccaggttcaggcgattcttctgcctcagcctctctaatagctgggattacaggtgtgcactaccacgcctggttaatttttgtatttttagtagagacatggggtttcgccgtgttggccaggatggtcttcaactcctaacctcaaatgatccacctgcctcggcctcccaaagtgctgagattacaggcatgagctactacgcccagctgggtaatgttttgaaaaacgagtatgtagtctgggtcccaatatgttctaatttttctagctctaatgtcatagctaacaaaggccatctctacttaattgcttgtactttattctcaggcttttatgttttaacctttgcatttaaacatattttagtatgaagtgtgaagcaaaaacgtaaatttttccccttaaatgctaaacaaactttagttaccatttattgaataatttatcattttctcattgatttttttttcaatgacagcctcgccataaatctttctgtaatatttcctgatctggcagcagccgcacattgctttaatttactttgtttaaaatgtatatattctcaacttacatctttgtaaaaattttcttaactattatcatgcattaatattccagataagctttagaatttgtgtcttctctaccctatccatttttctctctttggaatttgtttgaatttgcattaaagtctcctttaattttgagtcatccaatcacatttatgcaaatactttcctgggaaatatttgtgtgaaaagattttcttttaaaaattgatatacaagattatttcggtcttttagaagtgtttatactgctgaatcctttcatgatttttgttaaactggcttgtgaactagttcagcaagtcagtgtcgtatgctgaatatctaaatatatttataatgagaaatataagaaaacataataagaatatttctgtcttacatccgtggagagaaaatagaatatttataaatgcaaatgctctacaattactctaaggaaacttaaagatcacagtcctattctaactctgtaaagttatttgcttgtttgttattttaacagcatctttctcataagcatttaaggctggttataatgttttgtgtgtgaatattgagtaaaccaaatgattggaggcccgttatttttacaaagattttatggaataagcaagttcggaatggatttcgaaaaagagacagtccctgtttcagtgtggaagggacattggagtccaaaggtcagggtcagatacatgttttcttctttttttttttccttccttccttccttccttccttccttccttccttccttctttccttccttccttccttccttccttccttccttccttccttccttccttcctcttttttttttgtttttgtttttggagacaaagtctcattctgttgcccaggctggagtgcagtggtgcgatcataactcaccgcagcctccaactcctgaactcttgggctcaagtgattctcccaccttggcctctgaaaatgctgggattacaggcatgagccattacacctggccattttcttttgactagagctgaagttctgaaactagcagtcattggagataagacaggagaagacagttgggaggctccaagcatgtgatttcaggaaaagcatgagttgattattgagaatttcagatgtgagatttccaggaacagtgtgagtccagaagatgtaagaaagatcagtggaattcacacagtttggttattcatgcatcttcgaatatttttcagataatctcgggtggatacttcagttatttctgcctcagcccaccttatttgtaaagcagtattagtagaatcccctccttgaggggttcttcatattaaataagttgcatagccaacagcctgaggcataccaaacactgtatagatatttgctgttatttgtatgattgctgccttttactgagtggcatcctgggctggtgcttgggactcaacagtgaggacattccctcccacatctgcctgtaatgccaaggccttgtgatagggagtggcctgaagcccggggtagaggagtggacctccccagcatagctggggaaggagtctcaaggagatgacatttgaccagtcctcatggttgtttgcaagtggcttctctgctgtggaatgggaagaaagggtcttccaggaagaggggttagcctttgtaaaagtgcagagaaacgtttgtatgagcaagagagtaattagggaaccgtgagcaattccatgtgactctgactataggtaggctgcagggaagggaagagacagatgaggactgtcttcctagtgcctagaacagtggctggcccatagtaggtattcggtgcatcttagtggagaaatgtgtgaaagaggaaagagagggctgggaggtagactactactagattggctatgggtggagctgggggctcagcattttcaagctctgaagtttggtctccttgaaggaacaggagcagctctggattttagaaggccaattctgtccacagtgcaccagtgttctaggtgaggttggatgatggggagagggaagtctgaagatagcatccataaatctcatgacatttctatcccagcagtgcaatcaaatgttgagaatatgtcctgtagctttcttttagaaaaggggttagcaggccaggtgtggtggctcaggcctgtaatcccagcactttgggaggccagcgcgggtggatcacgaggtcaagagattgaaatcatcatggccaacatggtgaaaccctatctcaactaaaaatacaaaaattagctgggcatggtggcatgcacctgtagcccagctactcgggaggctgaggcaggagagtcgcttgaacctgggagttggaggttgcagtgagccaagattgcgccactgcactccagcctggtggcagagtgagacttctctcaaaaaaaaaaaaaaaagggtggggggcgggcaaattatggcttaaggccaaatccaaccaacagcttctttttataaataaaattttactggaacactgtctgacctgtttatttacatattatgtatggttgatttagcgtaacaatggcagagttgggtgttttcaacagagaccacatggccagcaatgactaaaatattttctatctggtccttcaagaaaaatgtttggtgacctcagtgttagaagattgtttttaggtatttaatggtgccattctggaaaagttggcattgttggaagagttcaaattgatgcatgtgtagcctaagaaaaatggggccatatcacttcctatgaagaaacacaccaaaattttaattcaattcttaagttgttgtcttgattatctaagttctgtctctagtctcctatggctatttttgtggctttgaccctagctgacccagcctattgtcagtagttaagaaggtagattccaagtgctcaatgtcatgttaagacttccttgctacctactaagggaagtcatttttttagccagctgttttaagttctcctaacctatttcatatgctatgttcccacaataaccattcccttctcttgccatttctttgtcctctctcctgcaatgtttcttctactgaaagaatacggcactactgaatctgtttctcctgggcagggcttgcattatcccacctgttccaaattctttttagaaccgggccctttgggtgaatgatgaaccatttaatagccccatgtactatagaaatttaaccattttcaaccaaacctgtcatagataagaacaaaggtaagccatcatgtgtctagaaaaacatacaactgatttcctcacagacattacaagttcttactcttcaaatgtactttaaaggactgagagtgtaattaggaatcagcagaagttttgtggaaaagaggcattgagccttttgcatattaaggatcaaattttatgttttgtatgaagcattcatgaggtgatgttcttaaaaaccactccagaggcacaggaggaacgctgaggacaagactgaatatagagatggaggaattacgtgtctactgggtagagatggagaaggcatatttatactagggatggttgaaatcatgcaagcatcttccatagctaataaattattttatccagttggcctttactgagggcatactgtgtaccggggcccaccctgttggatgccaggaatacaaagatgatcagagttcactttctgcgcttgaggatcccacagattagaaaggaggaaaaagagttactttccatacaaggctataaatgttacaacagttgaatttttcagatgaagtggaaggaaacgtctagaaggaagaggactgaaatgaaagaagactgggggaaaagaaataataataaacaaaaagaaaaataatttgaaactttttagagaagatgattgaccccattgtggagatcaagattaaagatgaatggcaggcagctgtggagagcagaggtggagatattgggaggatcagactaaagaactgaaatttcagttgtccaagcgggcatgctgttctacagcctcacatgtcttgggcctattagaaatatatataatctatctatgcatgacttatataccatacatcacatcatttcttccaaacttacattataatataacacattctgtattagtatatagtaagattttaaaatgtacaacatatttaaatatactccttacaattaagcctcagtaagtgctaggaactttgctaagcactttgtattatctaactgaattcttaccatgggtaggcactcttatacaacatttcccaggcaaggagttttgcccaccaaggttagacagattgtccaggattatccagggggtaagtggcactcacaccagggcttgtctgaccctacttaattagatgggctcctatgaagtaaattttaggataagctcttgacttaaaaatgagccttctaatggttgtgggagagggagaaaaaacaagtttacagaagatagcgggtgagtgtggagcagagaactagcataggctttgaagtcaagcctaactgaattcccagcttggctccactgcttgccagccacatggcattggtcaggtcacataaccactctgaatgtccccatctgtacattggggtttgtagcatctgccttgttagcatgtaaaggatctgcacctgtgcctggcacttagcagacactgtgacttgtagctgctgctgctcctgctatacctaccgtccttgccactcttcttatattcacatccacccatcctcctcctcatactactattactacctatgctaatactatggtggttatgatgagcagcagtagtagttggaatgcctcaaagataagatttatgctaaaaaacagaagcacagtagttatttaagacctcgatttgatcaatagcattagttctgcatttacttcaatatttagtgagcatgtgccatggcaggtctctgcgccaggcactgtagaaagttaaaacatgaagaagtcatttcctcttttagctgccatatcctctagtttgacctttacgccatatactcttggtcagatattcaagaaagaatcttgggagggaaagagttagtgctcatcgagtgcagactggcttgaagctgtgcatagctttggaaggaatgtcaggacttaaataatttcaggatgagttgaagattacattgagcatttactacttctccagataatctcaatttccgcccatcatgtgatggaggtgtcaccttatttacaggttcagattgttagcgggacactttgttatagtgatatcttacagagttggccattaggctataattgagcctttatgtggggtgctgggtaggccacatgaccctggttcctgtttccagggaggccaacctacataaaaatggctgtcatatatcgttgctcagaggggcagatatttacaacaaccttgaaatggaacttccacccaatatgatgaagactgacttgtgacagtttgatatgcctttattttgctaaaatagcaacctggccaaatatatttttcagcacatttattatagctacttgtttatatttatagcaaaagtgttgctaattccctagtatgttaacaggtcatattcaaattgttctatttttactttggcacaaaattgctgaaggaaacatttttaaggcaagtagtgattatagcatatcaactcactacatagtgaattatatattaaatgaacttcctgaactgagaaggagcttaaactgacaaagaagatagttttcttaaattctgtattgtttacataagatttcttcaaatccattttttattataggttactgattgtctcaatgttttctttttgctaaatttctaccttcccgccaacaaatataatcccccttttaatatataatagatgacctgggattccagaatggattttcagaaaccatcaaaaaacctcctcgctttagtgtatacaataaataatatattcttttttaaaaatatgagagtcaaataggtatatgcgtaaacctggccaacccttgggcagttgtaatttccataccaaaatgcatgagtctttacttgactgttactctgttatacattaagtactagttaccatggcaacctttgcatcacattatgacatttaaatataaggtggtgtgtttccttataaggaaagacaatgtatttgaatttttgagtgtttggtgaaatacaatcactactaaaataaataattttgtttaaggcaattgatttctttgggaattacgtacatttccaaccaaacctatggagtgcattcatttatttttatttttttgtgatgtcatggagaagtaaaagattttttttaaaacaacgcttgataagtataacataataattcattaaatgcctataattaccctcgtaagtggcaaaacacaaaattgaaccatatttgaggttatttatcagtgaccaatactgtagcaagagttcgaatgtaacatcacaagatttatgaaattctatcgcatataacacatttcttatttttgtatatctagttggttaactgtaactagttttgatcttacctatagttgaattaacagtagcagtttgctcatgcgtgcaaaagcaaaattaaaggagccactgaactcatccttgtggcatttccaggaacatggccacttaaatttaattatgaagattgttgggcaatttctttattaaatatggaaaaaacctagtcatttcttgttgccagtgtagctctaggccataaggctatcatctttgttatgtagactcccatatataactcatttttaactttttatagtaacttttccaaattattatcacagcttgtactttttaatctgaaaatagagaatctaatgatcactcataacttttggtgcatcttttcaataataatcagtggattgtaatatgggactgttttgtgtgggacataagaaagaggtaagctctgtgctggaccctggctctgcggaacattttacatatgttgtttcatctattcctgataaccctatgatagagctcttattagtccctttttacacgggaagaaagtatggtttagagcagttgcataactcacccccaaatacattgtctgtatttctttgagctaaggttcaaccagattggtctgaccttaaagccctccctctttccttaatagatttgacttctacttctgacttgttacagacacaatgtgcatgatatgtttaatgtagaaataaaaaacactgacaaaaaacctttaaaaatgtttgctaaataataatttcagtaatttgtatttctctgcagcacagcagttttttaagtccctgatttgcaagatatcttggtctttgtaagttacccaagtcctcttttgttgaaaccaagcataggacagaaataaaaataaattataaaggtgtactcttggaccttcaggaatcaggaaagaagactgtccaaagactgaccttcaattttgagctttgaagttcaaaagtggacaggtggaaatactgtgttcttcattgccctttggtgcgagatatattctaggttgcagagtaagtgccaacagcagcaaaattatcgcccccctcctgctactgtagtaagtcagcaatggcccttctgtggtcagaatggcacattcagcagcaactattcgacagggatttacagaaacttccccatggctgttaggaatcttattcagcagtgtctttgaaaacccgattctgtgcagaattagctatgtagaaatgacctaggttgtgataaaaggtattttaaacaaatctaacttgtaatttcactcaatgtgtattttgcatttaatgccacaaagtctggtagatacctacacatatattttgcattcataagttttatagtggttcagaatttttttccatattaacattttaaaaaatcctggctttatagagtcagttcaccatacaaagccactatacatcacttaggtttgtgatgaaagaatggaattgcagctgtgtgagtactagaatacccaaacatgaattagactcacaagcatttggcaatagttcagaaaaagagcttaatctggtttcatctgagactgcttttctctgttctgcaacatccccccaagatgttgtgtctgataccggatcacaacgtaatgggagtgacgcagaatcgagaaagccctgagaaaccaggggcacatttgcttttctccagagattttctttctcctacttcttttttcccctcttccagtttccaactctgaaattcaaggtcattcacctattagatgcattaattataagccaaaaaagcagtattcatcgtactctgatctcagtcatatctataattaagtgtaaatataatcttcctttttagaaatgtaccacccacccattacatttaaagtgctgactgaaatgaaataatagttcagagcaagatgattttagtttaactagaaaaaagttgataatttaagcttcaagcagtgagttctatttttgattaccattcagttataaatctaatttgagatatatgctgcttttctgttactcaagtttaattcatggtttgctttcttggttgtataagcaaagttcagtggttgatcaaggctgttaagaagctcccctgaaaaggaatgggggcagggttgagaatgtgttcgaaagacattctgagacctatatctgatgtaaaacaaacaaatccgatgtaaaacaaacaacaaaattttaattgaaaaagacactcacagagtgctgtatttggggatttgaatggccaagttaggaatggccatttgcaggggaattggctgcagagggtgaaccccaaaacattccaacctggttgataaagtcagtgtgttttattctttggttacagtattttaggtcttttgggaaaaaaaattaggagcgagtaaggggaagggcttgtctcatcacactgtggacagttaagcaaaatgctaaactatgggtttaagatttacaggttagctctgccagatgccacatctgcctccagtgtttcctggcagattcgggcagcctactactgggacccagcataaccgcagaacatgagcttgcacaatgtgaaaaacctaaaaccattataatcctatttaaggccaggatgaatttgcccattttgaaagtagatgtagttttcaagcttaacttttattaagcagaaacttgtcttcagagctatatctatatatgcaggtaaattcataatataaacaaataccttatccattttgtgcaaaatttaatttactttaaatcaaacgccattcactttttaaaattcataaactcaggtttttcagccagtggaaaatttatctttctcattgctacagagagttaagtatctgacgtaaaggccagacaatagtaaatggtcattgttcgctttataagtatactctacaataagaacacatatatttttatcttcattttccctaaggaggtgtttagggcccccttaaatgtgaggaaatgtttatttttgttgctttagaagaatgattctattgtccaagtgagaaagaaataggaacaaacaggtctaaggagaaagaaacaggaatgtgctttgtgaaaaaaataaagattaacaggaaccactaaaggtttgtaagtgctatctggtcctagtgctatgttactgcacatagtccttgcgcctgcatatgtaagagttggatgcgtgatttattatgactggcccatgaaattattttcttttaagttaacaacaataaggtcaaccacagcctgtagctgttttgtagttattttatatttttcacagctctattgtgaatgctgctaaaagacagtatagcaagtgtgtgtttttaggttgaccccttgaatgcatttaatttcttgagagtgaaaacctttgccaccaggaccaagaggaattaaccaatggttaaactcatttaaaaacacaagcaagcatttcaacatatttgcttagccgttttctgaatatttaatatacttctagagaaagaaaaatgaagaaataggggtgatttgtgtctagaatacaaagttattttcaaactcctctttccaatgaaatgaagactcattcgtagatttaccaaactgtaaggaggttgtgatttcaaatcattcacagctttattgatggaaatttcaaagaaaacttggacacagacttcactgtaactttctttgttaataagaaatgcgaagagtgaaatttaggttgagattcaaaaacttttgaatgccactcctaaatgataaattatttgttactagatttctgatttatgcaaaactttattataataagccttatgttttagtttgtcattgtgtagtgttttaatatgtctcataagttcaaaagaggcaatagttgagcatgcagatgtcagatttttatctgataaatctggttttatcaggtatttatgtggtaaacattaagatactagcaatgagtttattactcaaaatgtgctttcaatctgaaatctcatccttgaagttgtattttgaagtaatgtttattacatatctcttgaaaaagtcttaaactggaatcagtaaaggcgagcttgtcagtagctgattagtcctttatatatgactcatccaacactcagaaaaaccccttggaatagagaggttctctttatgatatttagctatatggcggtggaaaggggaggtttgaatttttgattttccagcttatgggtcatatttgaccaactgctttcactagaagacatgccactttgttgagctatttaggaatcaaaaagactgtcttaatttaaaacaaggaccctttgttttagttggtgactgccttgtgaaatttttcagttctcagcgggttaaccagggaacaggggcagagtcataattggcctatttagagtattttgcatgtgaatagtgtgttagtgaagcatccctaagtctgttgtgagtgacatggtgattagaatttagattagggaaaacacattctgtactttatcaaggacagtaattagttcagtcagtaaaagttgattacaagtaacgataaagttagatttttagtacttaattttaaaatttctttattaaatagtaaatttgttcttaatataaatggtactatctactcttgttttattgcatatcagaataattaaaagaacaatgtgttcaatgcagagtataatcaagcgatttatatattatgggtaagtttctatgtagtttttagaaaatgtaatattatataatctttctgatgtcatcatttttagaagtttaataattgtcacactgtgataggttattgtggaagttttctagtgttcaggtaaatgtttaatctgtgggatgtgtcttagcttccgatagacctcaagagggcattctgaagtcctttgtggctgttagcttggaatatctgctatttctgtaattttgagagttagtgtgaggatttgaatttcctcttggttcagttggcattttctcttctgtgggtgctatgtcagttcgtggagaatcatgatatgcggtacagagaggcagggttctcagtcgagttcataggctacacttacccccagtgtatgcagccaggggaagttgtgtgcgttcacaaaatgaggttcttcttgttaaggaaggggatgaatagttcccagatatgagcctcagtctagagaaaggaaacattagtcttatataaatgccatttgttttgtgaaatgaaaacgtgagtcatcttaaaagacttaaaaaaatattgtttaaagggaatcatctactttcctcctaaaagtaaagaattaaaaattcacaaactttgtgatagcttcttagactgcctttcttttgggtttttgttttgttttaattgtctcagcttagcagatgctgtttgctttattgcattggtttaagtactaacaatcagttgggaggtggtgaaagtaaaaaattaaccttatatgtttgttttccctttttaaccttttagcagagtctccttggaggtgacatggatatgggcaacccaggaaccctttcgcccaccaaacctggttcccagtactatcagtattctagcaataatccccgaaggaggcctcttcacagtagtgccatgggtaaggtattcctttgtttgaatgcctgagggatgattatgcctttttctttttttctttctttctttaaaatatcgcccccccatcctacctcccaccccaagaaaaccataaaatttggctcagttgtcagcctggagacttcccccctagtacactgagtaggtacgttaacagcttatggtagcagaacttttttggtgtctgcttatgtctagttttctcttagctgcacccataaggaagctattaaaagatcaaagtagcaaaaagttaaatatcttcatttttatgaacaaagcagaatttgatttctgctagaatcgaatgtgatcgtggtaactacagtttgctaaggtaatgatttaaggaaatgtggtatcatctagaagtctttgtggtttaacctatcttagttaggaaaatgggcatttgggagctgaaagcatcttcattttctttcagaggtacagacaaagaaagttcgaaaagttcctccaggtttgccatcttcagtaagtactgcttgtttctgctttgtatattgcttattttgttctgttttgtattgatgggaaggagatagaagtaaatgagtttccatgcgcccagagcagcacgtttatctagaaggtggatgaggtagaaatgacctgcacatccagccacctgacccacattggagtgattaattgcacatcctggaagactgggtggttatgttgatattcagcaggttaagctctaaagagagccttgaaaaggtgcctgaagtttgaggagttttacctgtacagggcttgcaagagaatgagtattagtttcatgtgttggttaaattctttgtcagtattatgatgatttatggatttgcatgcgaaaggagatttgtggagaggatttaggaaaaatttacatgggtttcagcccagagtgcaggaagaatgtctctattttctggagaggttgctgaataaaggctgcaaaggtagctgcatcagtagccatttgtgtctttactaccaggtgacaactagaagtagtcagctgtaaccaagagcattctgggtctttttaacagctggagctctatgcagaagttgctgatatcccccacccacccccaggtccctagtacagcaaaagttggttgtgatcacaactcaatacatgatatcatattttgaattcttacgttcctagataattgtatttaattttatttaggactagtccatttctagtaattttctcctcatataaaatgaaaacatagtttcctctcttctttctttgtttctttatccttcctcctttttttcattcttccttgctgtgatataaagttttgatttaattctgtagagtactagtattctttgaaaagaatgctgagacttattgtttttatactttaatataaaatcatatttagatttcttaaagtatattaccaatcaatgcttgcatattagtttcatttcatttttaatgtattagaagaataataggtcttgcaaatgtgctaagattagattaacccaaacacctgtgtatttgacttgatttcagttcagctcatccaaacaattattaaatgaatatatcagaataagtcttatcaggaaaaagagtaaattttgtatgctgattatcatagagttggtgatgttgaagaagcatcacaaaattattcataaatatagaaaaatattgtgtaaataagattgccaatggtgtatagtcactttcaactagcaataagtcacttaaaattgtactcagttgtttattgtttgaatttctgtgttgtattgaaattgactaatatgcccaaaggattttataagcatattttaagcttgaagttaggggtggatttaatgttgatgaaactttagcttttaataggttttatgacaacttcaaatgatacagtcctaacagctgtttacattttaaacatgcctgaacttaatatggacaatattaaatgcatttggtggacctttgaatgttctgaaacaatggaataactgtcctataaaagccataaaaaacttaaagctatcataccctccttatgcttcatattcaaattaacttgttttatccaatgctaagattaggcagaaatctagacaatttctaaggagtgcattggtgtggcattggatggtatgtatctgcttaatcactgtcaacaacaattttcataattcgttgtaaatgtttaagtatttccctatagctaactggcccctttagaaaattttactggtacagtgttttctttgctgttaagacaatttaggtgttgctgctatgtcgtgatacattcagaaatataaaaataattttcctttctttcccaataaacaaaacttgggaattaggaatttagttttattctatttaattttctgtttttagtggtcagtttaggatttactcttcttagaagatttatcttgactaaatgttttcatggtccttatgaaacattttgatgaatagccttttttctgaaatataaggaggaagaaaatacaattcaaaatgaaatttttattgcaattttttgagcaagaagaacaagtttaggtaattttataatttaatcatccatttactcattacctaaaaaaatcccagctctattttcatagcaatttaacttagtttatgtaagctttgttgtaaatatcaattgcttattacttacaacaagatccacatggcttaccaccacacaaaatatttattttaacttgattccaaaaaaggtctgcagtagacatggtcacacttttctagtagcagatctgtatttctatatttttagacctctgccatgctttttttaaagctcaaataaaattatgactatttgataagagatacttcttaaattgtttcagtatgtatgagtatttgtataacagatactaaaagattggagataataaaaggtttcctttggagtgattatgactacataagacacttatatgttttctttgatacatatttaccatgacaaatagtaataaatctgtcacaatctgttgtggcaactcactttaccccccattttgaagtgggccctctctttcccttataataaaaggaagaaaacttaaacggtgacactgcatcatcaggtattatttgtgacacgcctgtggtacagagactggacttctgccgccattaggctgggtcttcctcccaggcaatcaggagagagaggggattgcctagccctgttttgaaaacactgcagcatctgtgggagagagaaaacgtaggcctggccagacatcatgccatggatctggcaggatccacgaatgtgtgtttgtactgtgtgctgcacctagagacctcacgtcactgtggaagtatgacacgatggtgggataacagaagacccaccaggcagggtctacaggacaagcacagcgtgtcggggggaagcctgtccctctagtgcacatagaccagtacttgctaaggtgattttttttttaaaggaaagcctgtgtgaaagacagctatctaattgcccacgagagctctgcttattactgcagtacatttttatcttctcggttcgtattttagtatgttgctctttttagtcacgtcccaatttctcgtagccctcgttttttgcgaagaccttagtaataaagtgttgtcttttgttgatgtcagaatttattttgcatgtctaagctcttgaatctacatgagaacatcttgttttgctagatttctacattttggttttccatttcaaaccatatttcatcttaaactcaatattttgcaactttactgctcatttcaacaaatttgttttatataacctaataatcatacacattgaatcatgaattcatacacagaaaaatgtactatagtaaattaaagttggaaaaaaatgatttatgattcttaacagaaattaacatgaaagtactaaaatctagaaagtagcaaaaaattttatattgtgctgttttaagatactttcatcaaacacagaaacaaagcaaaggcattatcttttggaaactttattctgcccatcaacatgtaaacatgtaaaacttttatcttagaatttgaaatatttcaaaattatatacgttttatcagaaactgttaacaactacaaactttctacttcagactttggtggaatttgtctccacttgtaatccgatttgcatctttaatgatggtctcaccatgaccccagttggaatctcttgaacatcagatttttctggaaataggatattttatccttagaaatagtttatgacctctcatctccagtgatctttcctaaagctgtacttctcagtaaagtcttttttctacgttaaagtacagaggggttttgtgtgtctgttttgttttaaaactcaggaggacctggcaaactttaagtggtcagagataatttgggacacatggatcccaagataaacaatttctactactataaagattctaaaataaggtttggacgcttcaagaatatttgtgacattagttaatcagtaggtaggtttgaaaaataaaaacaatgtgtattagatattaggttcaccaattttcataaggaaagaattcttaaataaaatgaaatatttaagtatggattagagtttcctttacagaagcaattattaggggtatcaagaaaaatgagtaatgctaatggccttaaatgtcctatgtattttgtgttatataaaaactttcctatttgaagatttcaaacatgatgttgaatccatatcttgagctatttagggaaaaccccttttatcccaggtgcttgaagaaatcacaaacaatttaaaagagatattggtaaactgttttttccttattagtgggctggaaattatgtatgatttaaaaaatcagtactgaactcagaaatatataatttcctacatcacttttgaaattgatcatagggaaatcagaacgatgctttttcatgtcaacaaattttaacaagtaataatacaattttctttaagatgaaagttttattgaaatatgatatcgatcacaagtgaacgaaatatcagccatctgggctctatcctttttaggaaagtctggaagtagccgattgtgtggtaagacgtaaaaggaggaaactcttcaaggttcatccctgcagggatagatactttgtgaagaagtataattgttaagtgtttaaaatattaagatagctctcagtattcacttttaaacttagtgtgcccattttctaattaaagatattggaatatgaggtttggatattaaaattgtgcttattaatgtttaggcaagaaggaggttaagagtggcacaattaagtcatctcaaataggacaaaactattcacacaatttacacggcatatataacatgacaatggggaacagtgaaagctgagaaaatattcatgacagagaaagtatttttgtgtgtgtgcagttaatgctgaatttgctaaaccagacttctagttcagcatgtgcgtttttttttttttgtgaaaaccaatcttatcttctctattacacattgagactatagagtttatgatttttatgaattgctgatatatgaaaaaatataggagaatctttatatttgttttgattggaggcttttgttccattaaaaatttttcagaaagcacacaagaggcttgcacatactcaacatacatactattaggcattctaatatcccagaagtttgctcaaggatttctgaatttttgtttggaattttggaataatgagctccttcatccactatcctcctcttctctgccttgaagcccaatcctgcaccctttaagaaagaaggcttctggtgtgcatattttagatagaaagagagaagaaatataaaggaaaagacaagcatgaaggttaactgtggatgaaaggtttgtgtatttttgagctattcctgctttatctttacaaacaaaaaggttgtatgccccaaacactcaaacaaaacaccaccagttcattccttcccccagaaagaagccttcctggccagcagcaccccatttttctactcagtgatctcttctaaggagtggtgcctgatgtatcttcctactctccaatgtgtttttatttttaatcaagtattcaaaatagtattttgcatgctaagatttatcaggactttcgttaagatgttagcagctgctaacataaacaataatagcatttagtgtaaaactggacttgttgagaaaagagaaatacatttctgggaactgctattttgaactttatcattttcactgaagagtatattttggtgtgaagttttggactcgagagtggtttaaattactgagaagtgtaggaaaccactgcagggctgctttacccagagagaattataacagggcttgcatgtattttgaaaataaaacctttttctatggcatccagcttaactgtgaatttatatttacgaaataatgtagataaatgccttgataatttgattgaataccattttttaacttttaaaatttaattgattgaaatagttttatttgctaacatagcaaaatgttctccttttttccagatcactgacaatttctgcattttctatgttttcttggttttgaataattctaaaggttttcattgaaagtaatgaatcaggaattggagggctaaataagattctcttagaagatgtggcagtaatcctaaaagaataaggagtctcttcaagaattgtcaaagttgtattttcttaaggcagaatccatacttgtcaggctgttgacagacacttgctttgtcttggcttttgtttgattttttacataactgcactggattattaaactgaacataaaattgcacctcaaagcaatagcacaggattttcagccttgatcaatttctactatccccggatgtgtgtgtgcacgcgtgtgtgtgtgcacccatgtgtatgagtgtgcttcttttaaaggaataggagcttttatacaatgtggtgcaaaacttatagttttaaatacttaattattttatctggaaacagcagcatgtgagtgattcttttttaagttgcagctgctgcataggtgtagagctatttgaggagtttgatgctttacttgagcatatactccctcttcagagaagttaaggtagtgcagaagtttctgcattttgtaaaatttcagggttgaaaataaagatgctttatgatttggtgagatggatagatttcacttctgaaagaatgtgcaagttgtattttgaaaggaacattttaagaattctacttaagtggtttagtgacacccactcttgtctcttgtctgactttgtcatctgaggaattaatcataaataagccactagggatgaaacttgatatataagtgcttacttccagagtaataagaagaggaactgtgtgtgtgttaaatttcactaaatttattttgattattccgtagagcaggaaataggaacatttcgtagtgaagctctcttcatagcaaactgtaaagaaaatttctcagtgtgttgccatatgttggcagtgattaaagggcatttcctttgtgaaacatggagccatattagaaagacttatattttctcataaaaatgacctttgcaagtacatttaatcatgaaaactggtgtcattcgtcacatacacatacaaaaagtgtcactgttaccattagggattttaggaaaatgctactttggaacaattattttgatggcatctgagaaagaatacctaagtgtctacaggagcctcctccctccatggcccatatcattctaaatatgcctcctgaattacgcttataataatattgtaatgtctttcattctaccgattggcacagtatatcattatatcattagctgctatgagaaagcagtttcaagtaggtggcagattcttagcattaatgttttcaagtaaccctgtttggagaattgggttgtttcacaggtgctcaggtacattaacacagtacaataatattttctggcttgctttttatgaaacgaacttgaagtacaaaataatttaataacaagtggagtataaaaactggagctctagcttaagaaagtttaataactcaagacgttaaaggataagaaaaaaattgtctaaggaggcagcagtgtttagctcattttgcgttactactaaagctgaaatttattaggagaatgtttatggcctgattatttagacttgttgagttagtttaaattttttaaacgatttggtcaagtagaaaagcacagttctgtatctattgtactatttgaaagtattgttacataaaataaattcgaaattctgccatttaatactcaggcatatgattcaggagtgaaattgcattgccagaaccttggggtccctcatgtatcttaatatgaattttatttttagaggtgtataagacattggcacatataatctgtggcttaattgataacagcaaagaaaatggaattaaaaatatttattattaacagatacagttgggattacaaaattcaaactgcagtcagtaattattttacaaataaatgctatttcattttccctttagtaaatatatcagtaacttcacccaatattgatgtaagtgaaacccgacagtaacaagctgggagtgcccaggtagaaggggaaaaaagcatgttcatttattcattcattcctttctccgtttatacttattcaaagagtatttttcattgcagctaaaaactagacacaccatgtaacatggaacatgtctttttcttctatgtattcttatttaaatcgtggagcttttcaactgagattcttcacgtttaatgaaatttgcagtcttgtgtcacttgcgtcacaatttgtaggaataaccttagcattttaaagagtataccgtgtagccttttgagaaagtcatgcatttgaaaaataaaataacccacaaagtgtaacacatggacttttgtcccttaagctgattgcccttactcacttgtcaccacctttacgagagtgagggatatgttttagatacatttttttttgtcctatagaaaccagactcactgctttacttatgcgtattactctgaaatatatttccagtgaatgaatatagtagtaaaagtggtgtagcaaggtagaaaaaacactgcactagacataaaaagacctttcaagtataacgtctgacagcctctacttacacacccagtggccttggttaggtcacaaacctgcttctctgtctacaaagcaggtataaaatagtgcctgcataataaggtggtgtcaatatactgataacaaacctttatcaaagtacttattccatgccagagtacttattccatgttctaagtggtacactattacatcatttgcatctattgaatcatttattcctataaaaatcctgtgagatgggtactactgtttattcaagagacttaaaaatgagacacagagaggtgaagaaacatgtctgcggtcacacatagtaagtggcagagctgggagtgagacctgggcagcctgtctctaaagtttctgtgttcttaaccatagtgctgtctatgctgcctagcgtttcagacactctgtagaccaaaaagctctctacagcaaggttgtcattaagttagcaagtatttgactatctacaataaattaatattcagaaatttcatttcactgtagagtgatcatcagtatctctgtatagtcatgtcctataacttttgcccaagcaaatcagtatgccaggcagtccaggggagcatctgtgtaaacaaagacagtataatatagtggttagagtatgaaatctgatcaactgggtttttagggggctatgtcacttcctagctacacagttatttgtaaaataagtactcattggggtttgaatgcatttatgtaatatccttgaatgttacatactattgttacacataataaaaagcactgtcatgctattatcagtaacaaggtaactacctttcatttggcatttgagaaacaaatctaacatggcagcctacttaggagtagttagcagtagaatagaaactaagaccagggtctcagctatgttcaaaagaattttacctaacagaggtcacttgctttttctgaaattatgtaatattgcttttttttttttttttttttgagatggggtcttgctctgtcacctaggttggagtacagtggtgcaatcatagttcactgcagtctcaaactcccaggctcaagcggtcctcccacctcaggctcctgagtagctgggtacacaggttcacaaccaccacacctggctaatttttttctttttttttggtagagacagggtctccctgtgtttcccaggctctgcaaacccatctctatcaaaccaagacacgtagtcagcccttttaatcattagacctagtggtctgcaaagtttgtgttggaaatactttatcttctctcttttgaactggtacatcggctgtgatgcccggagctgcttatactgtggttcccttggccaataatttgtttatgcctaaatcagccttgcctctaagtgataaggagatacgtgctttttcttttgttttgtgtcagtggtattctctaataggccgggaacgggtctgcccaagtgatgcacagccccttggtggggctggctatagatccccccgcaaaactgaaggttaggcctaagatattagctttgcctggcaagatgaagatgtgtggactaggtagacctgtgtggcagtctgtttcttttataaagtaaacagagttcagtttgtttaggactgcttaggtagatttcttacactgagcaggaatatttgtacagatgttttaaggtaaagtcaaagaatggctagattgtagcctttgacgcattataatgtatcttttctcagtgcccctgttgaattcacaaaagaaaaggtatttttgatcatcggctatgagaaacttaaaacacttttttttatatataaaggctgatttagttaactcttcttgcatttaaagaaaaaaacatctgctgaaagtagggaggggggaggtgtgagcggaagcgtggtctccacattccacaatgaatgtcttttcccagccaattttaatttgcagaaaaaccaggcactgagttagattcctcgggaaaagtccctgttggctgatgagccctgaacttcttccgtgtacaccctgaacagggactgatgcttcagttcacagagataatttttctctggaaagccgatagatccgatttagccacccctcatttgtagtcattgccaccttgtggattacaaaggatattggttttcatcaaacttccatttcgatttggctttttatggcaagtacacgttggcagtggattgccgtgttcctcaccaaaaggatcctggtttgttcagcaacacctcacttctccactcacagttcatttatgattctgatgagagtgttttttcaggaaacacacatttcactttttgacctaggagcatctgttagaatttttttttaatactactttggcattctgaaagtgttaatgtctttcatatctgtttaatgctatttagggatatttatgatcacctcttggttactcagggtaaagtgtgtcgcaattttttttaaacagacaggaaagcattcacatgaggaaacagattgctttaaacatgtgcttcctgtgacagtaaaaagaacaaattagatttaacactgtgtaatgaatgcataaatgtgtacatttaagcttttaaaagctttatgttcagttctggtcacaacaaaaattgagtcacctgtaaaaattaaagatgcccagggtactctcagacttttgaaatgcccagcaattgcagtcctcacctgacgatgcctcgttggaattataaaaagcatgatctattagtgctggagagaactagaacattacaaggcacattcagaggttaaaccaggttacagtcagattccgtacatttagcaaataaatcagaatttgttgtgggggggagaatacttcactctcatcttcctccctaagaatcaatgaaaaaatcaattttcgggaaccccatatattcctctgtctttcatgaaagaaaaagaaggaaacctgatgtttacttactagcatttactacaatttaattatataagaaaatgactctttttcttatgtaattcagtttgtgttttgtatgctggcagggagtgaatagaatctgagttaatatttccagttagactagagtgtggaattggagggcctgaatcctctccccggaagaagaggcactcatggccatttctgtctgagcctgcggatagtgcctctccgtcccctgtgctttcaaagctaaggatttgtggcacgcttgccatctctctggccaaggagggccaggagagagtccctcgggggagggcacatagtttgaggacatctgactctcttctatcacatactgaggtactaatatcaaaacagactgcttgtcgtcgcacggtggggcagtgctttttttggctgccgtggtcgaaatgaaatgggcaagctgtagtccgcttggcatcagaatgggctaagggaagcagggaaatcagagtcagactgtgaatgcaagtcacagccaatggttaacttcctttttgtgtgtcacttggcagcagcgagactgatggtgatttttttttttaacatgggtgagagttcagtgccctaggaagagccgtagatgctgttattgtgcttcctcatacagttgacttgtgttgatttcttgaggccagtacagctgttccaagagccagctccaggagctttgtgtgtatgtacatggccatcggacgtcggatgaaaaaggtaaacagatgagaggtgatccatacaaaatctcactgctgatcactaggcagtcttaggggaatcaggttctggcataaggcaataataccaaagaataatatatagtgcacttgaagggatactcccttgtatacagacacccaaagatatttttaaattatcaccactccgcacccctcatctcacatacaggattcaaatcaattttggactgtctggaaaatgtaggactaaaatagccagattgaattcagataaaattaccttctgcttttttgggaggttgttgctttttggttagccacattattttctttgaagattcatttggaagagagtttggtagaatttctagcctctctcaagattttcctcccatttctctgtttgcaaagagctgttccccaaaggcaaaaagagcgagttgccatcttgagcgaattgtatgtttagtgaacaccaaatggtctcagagttaccctaaattttcattatatctggttgctttcaaatactatttattcccctcaaaactcctaaccatttatataagatatcagtaagatgaccaacttctgacaacccaaaagcagggaaggaagcttagaaatagaataccatttgtctggtaattagagtgtatctcttaagagttcgagagaattctgattaacctttctgttcccacattctcacgtaaaattagcacaccttttaaattattatctagtatttaaacacatatttttgagtcttcttaatgcaacaggttctggggacactaaaagtgtgttatagttttctaaaaaacttcatttttcttacattttaaatgttctgtttgtgcaaaatttcgagaatcaccataagggcttctttgcatttttaatttagtaactaacatatgaataaatttgcatattaattagttgcagattaaatcatgcatacataattgcctccttactgtgtttaatgtttgtcaaaatctccagcctggtttgatggatgtcgtatgaaagattacaatttgatgtacccttggaagtatttacaccaataatgcaagattcttaatagcagaattttctagttatatacagttactaataaacatgtaagataggtacatgtccctttgactaaaatttttttctttgcaccaaatcatttactattcataatcattaatgcatctcctaattatacagcatatgtctgttaaccctttcattgctggccttcaaatggtagcttctttctttttcttgccccctaaagaaagcaaaattgtttgataatactctgaaattactcgattgccttttatttatttctctcctagtatatggacaaacctcatttgccatttattttaacatacaatagataattatatgatcattttgtattttctagttaaagatcataaaatgacccacgtgcacatggttagtagctgatgggcttttgcctttcttttaccaatgctgaaaaaaattgaaatatttcagatacttcatatagtagtaaaaaaaaatgtatacacagacatactctctatttaggagggtaattgtagaataagtaaaagtattaaaattatatttaaattcattttgaatattgaaatgcatttaatgtatcatgatcaaacataggatggaaatgtgattttttttattagaattgagatctctgaagtagaaactgacaagagaatagatgctcttgatttgacataattttaaaatgccaataaatgttttctcaaatttcttcaggtatttaattttttaagttttatcttactcatataaaaagtagaccaactggcttttttttttcctttttactattttgatgtctaagctgcttatcacactgtattaccctgcattaatgagtattcctactgtgcaaaattctatcaaaaatgatggtgtgaatgtcatttttaattggaagtttatacagtcaaatttatagtacacaacaaaaaatatgtatgtagttctgctccaagcctttttttaggcttttgatctttttagtttaagtatacatttttattaatctaagtgtcatttgaaaatctacacaaatatgactacattttttattaataccattgtattatggaagagagggaaactaaggcatagagtaattataatgtctgtaaactgtaagaagaacaaatacaagaatgaccaagaatagattttcaggggtcttttttagacatgaaaacttgctgaccggttctgtatgtttcacataagtcagactgtatgatttctgtcttctttatttttgaatgcctgcatttatatgcctagtaaaaaggcaaaggttaaaatgagttgaaagcataaacagctgatttcccttctttgattctttcataggagaaataatgtctcctggtcacctacctcaggagcatttatttgcttatcacaggacacaatgaactatttattgatttaacacaacattcttttacaacacgcaatattacattaaattatttagcaatgtgaaaaatgaaatgaaagctgcaaaacttataaaaggaagcaaacagtcagacctgaaacatatttatccacagccattgtgcctaggtaattcagggcatatggtatgtaaatgatatttggagatccttgccaaatctacacacgacgggataaattaaggacaggtttccctgggtgtgagtcccatgattgtggccggcacacttcctgcttgaatgtgtgtgttctgttcttgtctttcagcaagagcgtcacagagcattcagtggccaaatctggtcctcagctgacttctaagacattatttgcaattcccaagaattgattttatgattaaatttaaaacatagtaccaatttgccaaactttccctttgctctcacatttgaaaagtaagatctgaataatttgtcaggatatgtttagatattaagccatttaaatgggtatctttgacattagaaattgagtgcctctgagcttcttagtcactgaagaaaggtgttcctgagcagtgacttttctctaagctaggattaagatgtttcctagaacagactatgaattattttgaacgattgataattttggttccaggttggcccagtaataatttattaattcaacttgacaacccaaattactggtatcacttattttatttttgaattattattttgaagcatatactctcatttctagaaaggtgaaggcactgactcctatttagaataaattttaagtaggtaagaggttatgctgttttctttttttttgaaaggaatgtcttttctaagctgggggtcttagctcagagtttttaatgctttaaattaaggttcatttttatcttggaattatgcaattggagattttgattagaaactatggcagaattttttctcctataatttattggactatacctaaagagtgcatttactgtgcacacttaattataaatacaagacttatatgttatttataaaagttatttcggggtattttaagacatgtagagtatggcttaggatgttttattgtttttactattaagaataatgcttttactaaataaaactgtgtttcttttataaaagataatgctcttaatattatggttttatttgaattagcagtttagtctgtgtccccacattccatttcatttatggaatgcaaataacactagttactgcatagaaaatgaaattaggctgagtccttgttcattgctgtgtaaattgggtaaaaatcagagaaaaaaaaatacccttgagatcaatgtaaatcaatactacttgagacagatccagctaaaaattcatgaaaggggtcacagttctggaggagtttatataattatcatgtagcctatagtttgtgaactcagggcaaagttctgagctggttgttctgggaccattccttggttcattgaaactactttgcacagctgtgcttcaaactcaacaacagagagcaaaaacaatattcactataaaataaacctcgtcctgcctttcaacttcactgtgaacttgcagtcttgaaaacaacaaaagggataatcgcaattgagattacagaatccagattagatgtaatacacagtagggtggtatggcccaattttacttacatggggcaagtggaagtgctgtgaatgccaacatgttaagcatcatagccacttattaagatgttagctttaaatgtcagtctttggaccccatttgaaatgaagcacctgcattttattcaaagaaattaagatatattggggaatgcggaggtgagttgagggttttttttgtttgtttttctgttttgttttgttttttttttctggtgggagaaagtgccatagacaatagagataaaatatctcaagtattaaaagtctatttttatacactgtatgattcaaaatgactgagcagttttgaaattttgtagaaagaaaggaatataaggagaataagaaatgatatttgcatctttacagacaactctgtatagcacatttaagattctggcaatttccttacaagtatctgaaaattaggaattatgaaggaaacccagacagatacttaactatagcattgctaccaggtgtctctttgatatcaatgagttaggaaaccttaagaaaaaaaggttaaaacatccagaatgataacttattttagaatatgctttcagacaaaatatttctttgttaagaatgttgaaaggttttatttaattgttcacatatatttagtaaattttttggtagacttgaccgattaggcttgtttcataaaagatgtgggcttctgtgtatttagatcttaagtttatttcaaattggcctttataaaactttagtgcctttctcttagaattctagtcaacaaaattatattcatcaagtgtatacatcacagaagtaactggtgatacagagtataattcctaccatattgtcaaatggagtctatatctcctcaaagggaaagaaacactgacgtgagtcagaagttttcactcacttggcactgaatcagcttaaagttcgaggttgaaaaattcacaaatatttatagcacacctactaagtgccacgcctcctggaaggtggacagcaatggccaatgtttctgccattggaaagatttgcaccgaagtgtgtatggccacatgtagttgtacaaatcagagttcattttgtaatgctttataagggtctggtaccactgattctccttgcagactaataaacacagagcttatatgactcttaaaaatacagtgatagcaagtgcatcctaaattatgtaatcatgtggtccatgataacagtgtaatatatgatatacagatggaatcagccacctggcttactgtaattgttgttgaggtcctttgttatgaacatatatttctgttaacaatgcaacaaaataattttttaagctgtttttttttttctgtactgcctcaaatctagataaacggaatgtgttggaaaggacaacaaataagaagttaaatatgtggaaatgacatggaaagcacctgtttcttccctttgttttcttctacgtcatcaggaaataatatttaaccatagaatatggtgtccctctaagaaaatgtttataattgaatgttcaaagtagaatatagattaaataagtaaagatgacttgccaaaaaaaattaaagaacatttgaaacaaacagaagtctgcatcacacataataagtggcataacagtatcacctctcaaaagtgacaatagatgtgtccatctttatgcctttagcatgttgttggcattattagttattgtattgagagagtagccacgctatacaagagaaaggaaggtaaattagatccctcacgcccccttcttctgtgaattgtatatgtttttgaatacactctctgccaggacagcaaataaaatttggttcatccctgatcctcagcagattataatctaggtaaaggacagaccaggttcatgaaatcaaaaataataattagaacatttggaaactaggggaacaggtcctcatattgtgtgcatgttttatcagtctaaagtagatatagctctattgaaaattgttggctagtaatatgctcattttcccatttcatgaagacttattctcaaatggaagttacagctggctatcgtgtttttccgacaaactctcttctctgtggacatgatgatttctgttgttgtggaaaggaaggaaataaatctctttttgttcctcattcactcaatgagcaaagtgtgattgagctcctattgtgtgcagattatattgttggagcacaggacaaagaaagctaaattatcatctttgtttagaaatttaagatatttgggagcagcaaggtagatgcctatgcctagtttatttaacaaggcactgaactttgctggagaatcctatattctagaatatagtccttatctggaagtgactacagaacctgattctggatcacagagagctgcagatctggtgtgattaagacagtggccacagatactccactgagcttctgtcttgcagcttctgtctgtctcttccctgaaaatcacagggaccacagatactccactgagcttctgtctagcagcttctgtctgtctcttccctgaaaatctcagggaccgtgtggagttttgcttggtcaactggagaaacaacttttgattgtttttatgtttttcagagatttatttgccagagatattacattataataaaaacataaacacagaagttagggattggaacaaaggttatatggtcacaatttaactcatagttatttgaaaattattggtttataaggaaacagatttagacaaagctagaacttatgcaggtaagttacaaagctagaacttactcaggcagttgctcacgtctgtaattctagcactttgggaggccggggcgggcggatcacgaggtcaggagttcaagaccatcctggccaacatggtgaaaccctgtctctactaaaaatacaaaaattagccaggcgtggtagtggtgcatgctggtaatcccagccactcaggaggctgaggcaagagaattgcttgaacctgggaggcagaggtggcagtgagccaagatcacaccactgcactccagcctggtgacagagcgagactccgtctcaaaaaaaaagaaaatgtagtggacacaatacatttagatttttaataaagtagacatatgtttattgcagaacatatgagcagttgattagttaaagatatccaacatgccaggcgtggtggctaacacttgtaatcccagcactttgggaggccgaggcaggcggatcacgaggtcaagagatcgagaccatcctggccaacgtagcgaaaccccatctctactaaaaatacaaaaactatctgggcatggtggcacacacctgtactcctagctactcaggagctgaggcaggataattgcttgaacccgggaggtagaggttgcagtgagccgagatcgtgccactgcactccagcctggcaacagagtgagactacatctcaaaaaaaaaaaaaaaaaaaaaaatccaacattgctggcaagtttgaaggtcacagcccatgtacaaaattggtatatcttgaggaactcttgtctttatcatatgttctgtaccatttccttgcacacaacacagttactatatgatggtactaagtagatacaggtccagaccccataaagaatgtggcattcagttcttgaacagatgttagagaacacaacccactcggcagtaagggatatcttcaactagagggaagggtgagagttgacctgtttgtccttttgactcatatttagaaatgctaaagttgttttatgttcaaaatgcatttgataatcatgcctgaagaggtcaaagtgctgacattgttgaaaacaaatacccctgtcaaacaaatagagacaattttcatgtctttggttggtaagcaccataatttggcctttggcattgctgtcagtaaagctagttgatgacttttacatcaatttttggcccaaccataaatgaaggaaataagaccaatactgccacagtactttttctcactcatcacccatacctgattcagctgggttaatgttaaaagccaaaatttatcaatatcaatttttttcccaaatcattcttattttagtactgtttatgctcaataaaagtttatgaatttctttcactgttatttaatgaaaacccagaattttttaaaattgcacattatctctttaaaaaaagtcttttagattactcgtgggatttactctaagttgttgtcttttaatagaagatgatgcaaaacttgtctcacctgttccttcctggtcgtgtctgtgtttatgtgtggggtgggtatataagtgcttttgattaacagaatgaagagagtgcttattttgaaaactcagtcgttaaaattcaagtttattttgagttaaagaacaccatatttagattaggaatggaccaatgacctgcttaagctttaggctatcgattggccttgagggaacttagatctgctaaacacgaacttgaaaaggcacttcagtgatggatgtacgttggatgctctcactgtatggtcattcacttgcattttaaaatttatgttttgtttttcctttatacctactcttttcattccgtttgtcagaggtggccatttaaagtatttgacaattgtttgttctctgcctagcaagttgtcctattgctccatgatgtgaaagaacaaaggtaatcaacagttagaaacctcaggaaattgctagaatcttcacccccaaagagggttaataaaccctagataattagttcatttagaatgaaaaccattttcattgtaataatcacatttcccctctgattatcgagcaatgcattgggaagcctgatatttattcacaaattttttaaaattgagaacatcctgtgctgagattccagtcagcttcatccatccattttttgttaaaagtttctcaactatcatccttcatccagacaaataaacataaccaggatttcccctctaactttttgggaattcatttacacgtgtaccattttgagggaaaaaaacaattgtcctcgaatttcatttgactcaggtgattgtggtaagctcgctaaccagcttcatctaggaagtgcagcaatctgagtcaacttcctccatctctgtttttacattgtccagtgtgatgcttcctcattgtaccaaaatagaaatggtttgtttttgtatcaaacttggagactggctatggattacactgggttaggataagggtttgttatttttttttttttaagaacattccacttatcccaagggaaaaagattgacggcctggggaaaaataagaggcataatgaagtcttttctccttaaataaaaatcacatctagtcttcagatgtgtcaattgcactatgtttgcctaatttcatttaatatttgagagatttagtagtaaatttatgacttttgcagttactttgcaaaaaattgaggaaggaagaagtgaatttcactttgagtcaaatgtgtaggttccagtgtaattaaacctaaaaatctatatattctggtcttgctacttggtattacactttgccatatcacataatgctattagctacattttaccttgtttgcagggtgatgccattttgtatctctggtttgttgaatttcctagaagatgttatgttcatgtagataatggcatactcattgaattctttacctcagacatgaaaatatgtggaaaagtggggaaatgaatctgatcagatttcactgtatactgaaatttgagaatctggtttttgcatctattttgcatgctgctgtctctccaaaccatatatgtctgtgtgagtttttataatgccacataaagcaaaatgagaagtctcttctttcttctaaagggaaatagtgccacagaaaggtagaagtcaaatatttacttatggatcaaaaatctagttaaaaaacaacccattgcttaccttagtaatcaatgtgaattactttataatcaatatgaatacaagctatctgaccagtcactcagaaaataaatatttgatcatgtgataaaccatttgaatgtctacatatgaacccaggccatataaaaataaccaattcaagataacataggaagtcactaaaaaagacacaaataaaattagatttcacagtttacgctgatattttgatacttttctgtgataaaagcatcttccaaactaaatgtgtccatatttgaaccatgtaaatagttaaaagtattttacctgagaatatctaaatgatgccaagaaaataagttcatgccactaaaaagattgagatgatttgtgctttatctgacttcttggtgtaatatggatttacttcagataagtatattttctacttatccgataagtgtgtttatctgagataaatattttctccagatacgtgtgtatattgaaaaaaaatttaaaataattaggatcccaattgaaaaagtaaaaatcttaattgcttaataagaaaacagttatttcatagtcttaagatttcaatacaaagaaatatgggaatatacacgtaagaggtttgttggtgttcattattaaattgcaaggctgtctcaagttattgtcatcagaataaattctgtgtgtgtgtgtctgtctgtctgcgtcctcctgttagtaattagatcttttatgaagttgtactcatacctattagggatttttgtcattgcagttttaagttgaatatgacacatggatcctttgttgggtctaagctatcaccatttattacaattttttataacattccatatatatgcatctactaactaaacatcagccttaatttagcttatgaattaaattttttgttaggagtgactcctgctggagagcaaaaaataccaattagtttagcttctaaataaactatactccttttttcaatggacaagggtaacctcctattccttggcttggcaacatttactattcctctaagtttaaagatgagaacatagatttgagtactaacacatcagcagaaattatatttttaagtacatacataattctcaggccagtcgtgtttggtgctccaaaaagatttgtgattgaatatctttgctccattgggaagagtttagcatggtgctgtatttttataattcttttttccattttagcagacttcacctaagtctattttaggtggagattttttttttttttttttttttttttttttgctgctgctctttaaggcactcttgcatagaggaaacagcagaggagacacaaggaaatgcactctcctttataacatgctgctgattctctgaactaggtgtcctctcatttaagcctcaaaagaagctgtgtattaactagatgaaggaactaacactcaaacctgtgatacagcttggccagagtcacactgctggggagcagcaaggttactcatcaagatgtgtctgaccctcaagtttaagtgctctgatttaataactttgctcacaccctgattccagtgtcttagtagcttttgatctataaaatgtcatctaaggatctttgagccttaattctttgtctttaaagtgggaatgataatacctgccacagagtactagttatggagattaaataagtgaaggcaattattatatgttctttaaattgtgtgtcactgtactgtgcatgtattaagtgtcgttttattagcaaatatctttttgatgggtagatgtttacctgaggtggttatttaatttataggctggcttgttcacactatgttatgtaatcattgtatattaatgaatatcactattttccttaggatatgatgtttagctaattcagccatgctaggcaaaagaggtcagcattgtagaaataagcaatgtcttatactgaaaaaaagaaagacaacaacaacaaaacaacaacaacaaaaaacaactttccgtgttcagtgacttaaacagaaacatggagttgttcaaattctaccaagttatattcgggaggagaaaaatgggaattccttccatatgaccattcttcattcattcatttattcagcttctatttgttgagttgcctgccttacactgcaatatgcagggcagtttgtgtgtgtgtagatgttcattaggtttatttgcactttgcagtaaccatgtaatattatcattattcagaaataaaggtagaatctactctaatgagctctgtggtcgagtggatagttcagctctttaccctgtaatagtttgttatctaattgtttaatgtatgtgcgattgccttcacaattaaagcattattctttagtcatattttctctcttttctcaattttctcaggaagaaaattgacatgtctgtgaaccctgtgcatgtccccaaatggagcttaacccaaagttgggaatcactaaataattgttcatgaaatggttgaatatagctcttcattcaagtgatgtagattctgaatatttacttattctttaatgcagttattcattcattcggcaagtttttattgaacatctaccttgtaggtaatactatgccaatgcattgggggttttaggtcaaatatttcccagtttcttataacaaatgtatgtgtgtgttgtcagttctgcttcacctcaaatatatctgtcaaagactttttggaaaattacaaaagaactgtaaactttagattctagaagaaaataagaatcgtgtgggtttcatttaagtggtcaacacttctagacagtttgctggtaagaatttttttccccaaaagtggcagaaaaagacaactgggttcattgcctacccccagtgtcctcaatagtgctttgtctaagcaccagagagggatggtggctttctgtatagtgtggctaaccatcattccccatcatttcagcgataacaaggctgggcatggggggtgggggtggtaccaagtaggtaaccaagttacctactgctggcaaggtaacttgtccagttatacactactgtgaaaactgtgtctgtgaaacaagcagtagactagttcagggtcctgtaaaaattggctgcttaagattaagacttctttaaaattattctgaaacacatggatttatgcatatagcttcagttgttcttatacttctgttctaactccccacgcatcacactaaaaatttatcatggatgatatttctgtcacaaagaaaacttcaaaggctgagatcgcagaaatgtctcagttgacaagccactgacttgagttctgtgattgaaatgtactccaaggtcagcaaaccaaaaccaaacatcactggatgataatacgttcagtgtctcactggctataattcgtagatcacctttcaaagcattatatctttattaatcattgtaaatttgtgcttttgaaatcttagactcgtttccattaggcaatgaagcccagaagcttaatgttctagtctcattttaattttttcagtcttatgtgctgaattgtcagggtttaaaaatcgatttcacctcatcagattaaaaatatttatttatgcacatgttaacaatatattaaaagaaatgagagcttcaattttaaaaataggaattgtagctcattaagccatgacaatttggtttatatttacataattaataggaaggcatttatatgtttgcaaaataggtaagaaaaggtatttaacgtagatgaagcagaatgattgtttatcaaaagagtttagagatctttctagcagtctacccatggaaagttaggatctagaaaagccttctcaataagggaagaaacaacaaagaaacaacaaccaggaaactccccaacttatctctttaaattccagcctcttttctaagtggtggtttttacatactgtcctctggtaggtgggtaccctggccttgtgtattaagcagtgagggtggtttaaaggttacaaatgtgatcctgtcagattgacaactaactgttctaatgaggaaaaaatcctcaaagcatgaaatttgaatgaaatgtgtgattataattcaagtactgtttacacaaacctctggggaccttccgaataaatgcagagcaagtgagttagacaaacctctgggccttcgatacgtgtgtgtggatgtgcggtgtgtgtgtgtttattttagagagtggggaaactttccaccattagcccgggctttgctcctcggaaccaacaccactattcctccttgtttattaatactgtatgtgttttgttagcatattgagttgtaaggaaataggtgctttgaattattaaagttgattcttgagaatagatgtatgctcgggtggcatttgcttcggcatatgcaaatgatttagtttcatttgggatcaattcccagaggccctcctttcctgtgatgctctgaatttggcaagctcaagtcagcccatctcctctccccacatccctccctttctttctttcctttttttgtacctccccccgcctttttgttgattggtataatatttttaaaagacaataaataaatatatcaacttgcttgtgagaaaccttgccatctataaggattctattgttcagttgtgatcaataaaggtgaacaaaggttttcacgttcttaaagtttagcaaaatcgaagtttagtaaaaatgtgcatgagatgtttgctaaaatatttatacagatactgggctgcggggatgctgcaaaactctgaaaatgtggtctcaggggtgcctttggggaaactgacagctgtaagatattcgtcggttcgaaggtaccaataaacttgctttagagcccagcaaatagcgtgaagttgcagtagattgtctaaagctacagtgaaagcacccaactccagagtggagaacgtgcgcccttggggcgcccagcgccagcgaggggagcagcgccccagcccctccgtaggctctgggcccatgcggctgtctgcggcggggcgaggtgaagttcatgggcggccgcgcttcccaccagctccggggaggccggggcccgcggagcccggggcgggccgcactgctactctgtttcattccgcaaccccgttttgtaggttgttgaccaagcagtcagaaaacactgccccctctctccttttgagcgaggtcagagacgtggtgtttttttttttttttttttttttttcttccctcccctttccctcccctttctccgagtcgagttctcaggcagctgcgtacaatgctgggagctagccagcagcagagacagatggcagagttattagatgtgcatcatacgattcccttcctgccactcgctttttaatcaaattaaaacaaaaaagaaagagagggagagagagagagggggagtcaattaactgcatttgtattctgctcaataatggaccctgttccacttttaccctaaggcagttgagtggaaattttagagaagaaaagggtgcctagaacaaaacaaaacaaaaaaaaaaaaaaaaaggaaaaaaaaaaagaaaagaaaaagaaaaaagtgaagactgcagaaatttgtaagaatcggcattattcgaggaactaataaaaacccctcggaaaagttgaatcgatctcgcgtatgcattaggatttcgagctccatcagggccgggctgccttccagctccgctgcgcaaagttgagcgtctgacagcagcgccgcggcctcccccgcccgccaggaatggtctcttcctgctttgcatattcaccacgcttggcccggccatatgggaaaatgcaactgaaggaattgttgtgaaaaaagggacagcgagtttgaaataaaagttgttagagtggtactgaggagaaaaaagaatccgagaccatgtactgcgcatacacaatcccgggcatgggcggcaactctttgatgtactactataatgggaaagcggtaagcgaatgcgggctgcgagggggatttttgacaagttttattgtcgcagggatgagcatcctaggtggtgatcattgtttgcaaagttgtgcaggactgccgcaccttcctgggtgccatgaaatatttatcatttgccaatcctaagatcttcttcttgcctacttcttctccttcgtctttttttccccccactcctcccccagagtagaaaaatagatgctttcagagctttagagagtggatcctagagcgaaagtttgcagtcaggtaaagttgagaggtggtatgattttttttttttaaagagttttggaaaattcttattccttccaaatgactgttagaaaggaaaagcagatatgagaagcagaattgagaaagcccaagttaggctgagaggaaatttggggtaagtttctccctggattgaggttttgtgatatctaaagtcttactaagttggaagcttgagtgcagtggatagagtggagagaacctgaaaggttaaaatagagcaaacacataaaactgagagatcaaattaaggagtagattatataagcttagatatatatttaaagccaaaatggggaaggaaaaacaaacgggttcattcatgcatataacagtattgtcataagttatttgtgctgtgtggcttcttccctcaatttcccccccttccaacagaaacgctttatttaagaaaaaaatgtgtctggtattttgtgcataaccccagcagaaggtttatacttgccatctggaggtttattttttttttccttcgtctgggcccactgaaggaaaaggatttcaatattttcaaatcggtatgtggggctctcgggaagagttgttgggtgatagaggagcaaaaatttattgttttaaaatagaaaagaagaatgagagaaaagtgaaaagcagccatttataaactgttctctttgtgtactttgaacttccatttggattgatcttaatcagggatagttgggccaaaggggacagatcagagctttcaggaaggcccagttcagctgtagcaattggcgcaaacgaattaaacatgtgtatgtgctgctatatgcctgtgagtgtatatacatacagatgcatgcataacggttatttctagatgagcatattctgtaatacatacatatacacaactgtttgaaggtgcagtttcagaagattaataatttcatttaagaagccagttttatgaatgggcaacttgaaataatatcgtttacttttattttgaaaagtacgagtaaatcatcaaaagttcatagcgctatcctatttttatcttttttaaaaaagagcacggtgtaattaaaatagttaagtgtggtaagggaaatataattttaaaacaaatggttttcgttgtgatttgatcaaagtgtttaaatctgtaaacataaatattgggattatgtaacatctttttttttttttaacaagtacatgatttgcaattggtagttactcatatatagataagacttttgcctattatcttttagatgttctcatacataacttattcagcacctttcattttaaagcacttttaatgaaaattttgtgaatgatgccatcgtagtcagtaagcaaaagtgtctctgaagcagattcagggattagatagcccttatccgtaatgaaagacttacattataaaagaatataagtttccatggtttttatctttcaggattaccaatgatgtgacttttacatgttaattgttaattttgcatcttaaatatctgaactgacaaaattttaatttaagttttgtaccttttaactcccttttggccaaaaggaattttcaaaaatatgtattccattcccacagcttgccagttgcctccaccgtaagaaaatgctgaatatgacatcatatcactaatatgccctctcagttgccaaatattttggttgttagattttttttttttttgagaggatggtactcataaaatcaagatcgctctgtcacaggaaatgtatttataggaactgttttaaggcgtttattaaaaacaaatctggtgatgtgtatctctattgattcaaacactagaaagaggcaaattgtacacacattatagttagaaaaaaaatagccatttggaacaccagcagaaagcttttgaaactgcggatggctaccagttgtccatcttagctttatgaaacagacagcaaagtccagttgtgtgtgtcccaaggaaggggccaattctataccattttttaaaatgccctcatgcatacactgaggaagcagatttttgtttattctacagtgtgtattctgctggctctaattctgcattgagtggcttttgatttggtgccagacatgttgtggagattgtatataccatgcgttaattgttcaaaatgcctatcgaagagactttacatttcttgagttttacttatcgtttggaggttgaatatctatgcttttttgtgtgtatgtgcatgtctaaccaatgtgtgtttgaacctgaattgttgaagttaagtgtggtcagctatttgttgcacaagttttcctctgaagagaacacagcactgaattccttcttttttcccagtgacaagtcaattacttgtttaaattcagtttgaactccctgaactgagagaggccagaggaagcaggttttccctgtgaataaacaaaagaagaaaaatggaaaatcattccaaaacacagtgattttagcttgtgggaagaatataattaagcattacaagaattatggtttcttcttttatgaactggcaactatagggtttgtaaaatcagttgtcctctaactttctagcagaaatataatcaatgatattttaggacaaacgaaaaaaacgtgaatttttttactaccttaagttatgaagtgtttccatgtccatatcccacaaaaaaatttttccttgtttctgtgaacaactgtacctgtccagaagtgtggactctgaaaaaaatacttaacaaaaaatcgtaacacaagagctatcaaagaataaattttggatataaaccagaatgtatttttaaaaatcagtttctcctcaggtgagagtttcatgaacttgataaaataatttttgtgatttttttttcctctatgcattagaggtttaaatactaacggatccaaatctaagcttaaaaaaaattaaagcaccacttctgaactacgaaacagatttttttttgcagagaaaatcagtagcttattttgtgttggaaatacaagcttgtatcaaagtgtgccaatgtgtctgtccttattaaggctataagaagtattaggcattacctgctctccaataagtgtagttctagctctaaattttgatctttatggcttcttgcatgttcattgaagaagaattttaataagtgattatttggtcaaatttcacatatctaatattatagcatatccacgaagataaaattatggcaaataaaactgaaaacaaaagtggcgaaatgtcctcgtaatggtaattgaagatcacatcatcagctctcgccagcatgtgcatgtgttaaaccgtagagagaaacctgtaattattgtaattgctctttttgctttatactaacaagcttcaaaccatgtttcaaagtagttgttttgaaatagttatttgtcaaatcatcaaatctcggaaagtaaatggtaatgagctttttatgtttatattctgactgttggtcatattatgcagcttttcaagtccataaagttcagagatgaaactggatgttaattatttctgatatcaaggccaaagaataaaataatgttacgagtcctgcttaaggtgaaaaattaggaatatttgaatatcagaatctctcaattgggaaactctctattcttagaagaaagttttcctgtaaataagtgacaatatcagtcagcaacctaaattttttaaagctgaaaattggggtatgaagagtgtagctttttctcatttatcacaggaagtgctaagataaaaagatcaatatttaaatgacgccactaataacatttttcagtacattttacatatggctcttttttttccccccaaacctcacagttggttggaacagccacacataggacataggtagccactgggttttaaagtttccagtagagtgtcaactatgcaaattacatttggcattttaaaaatatatttcttatacttactattttcagaaccatgattataaatgaaagcagccagtataaatgcttttattttttttaattgctgtttacttgctattacacagcaaaaatttgcttaggccacaaagtaatcaaatttttaaattccccactggttcaataaaataaaacatatcaaagagaaagcatgtaggaaaaactgcttttttgtgagcttattttttaaatatagttggcactttaatttacccatttaaaaataacaatgaaatttttttttatgcttcattactttaaaacaaaattatgttgattttgttctttatgtttaagctgataaaaattcaccagacacttaatcttgacattgtggctacatcttgccttcctgcctctgattaaattttcaaaatccctgcatgagattcacagataccagtttgaacgtttctgtgaggctaatttctcagggaaaaaatatggatcagttacatctttggttaattttatctagttcctaatttctgctaggtctaagcattttaaatatagtgttggtaaagcatccttctgtcgctgggtgatggcattattgcaggcagaattaggagaaaggacattggcataggagaaagagggttggggagaaaagtggtcaggaaaaaagatctaatagttgatgcagtcttttaaatacctttccaactgatctacaggaaattgtgctgaagaatcatttgtttcctgttccactataaatgtggtttgcattacatcccctgttcggctttttttgttgttgttttgtttctactaaattgtagtaccacgatggaggcttgagaataagtgatgtcttcctttataacttatcttttaatggcttgatcatagttggattttagacactgtcatatttcattatatgaattttgtatgtgtgtgtttccaagcctacttgaaacttctattactgctctgccactaagaaaaacaatgctgcagtctaagttctttagaatcactattgtaggtcaaatacatggtctacatgctgccatcagggatctattaaatgaatctcttgtttactcattcagaaaatttagagattttagatgtggttctggcaattgtaaaagttgttagaattcagatttacttttgccttaagaagaaaatacagtggagacatatatttgctctgcacagctgacctaaatgcatgccttgtacctgtgagaatttcagtatgcggacacataaaagattactgggccttttttccccctccaatattatcagagttacaaaataaataatctttcacagtcaacatagtttaaaagtaattttagttttaagctttttcaagtttttatatgtttaattgcactttattagcccttaatacttcaaacataactctaagatgacacaggctaaagttgtatatgataaacattattgattacttaaaaaaaagggatatctgtatattcataaaacatttataatctatttaggaaatcatcatagtcctaaaaaaaaagcagttgtttgtataccaggaaaaagagatcagtagtgacaaaagtggaaaagatacttgtataaaattgtctcctttagtgtgaagtgatctactgaaagttatacttggaattttcagaaaatgtccatagttgtaggctttataacatttcaaattctgtaataaactatttggcacattatcatatcattttaggtatatagataccatggcattttattaagcaaaacaatttttttcttctgaagaatacttaaggtgaaatttactggttttgagcttgaaagtggtttgagaattatacatgaactccacttaaactttggagactttcctttttgcagtgctaaagatccatgacttggttccaaactacaaccttttatttgcagatgtatttatggcacagtaccacattctgattagaatttaagagttcacatttctgatatttctgtctctaaatgctgtgttgcttctgtttacctagttttcttcctattcttcctaatttcttaaagaaatctgcacatattcattgaggtatttaatccaaaaagatttaaaagagacactacgcctctaacattctgtttaggagagtatactactttaaactccgttctccccacctaaaaaaggggggctaaagagtgggtttgaacacctgagaagtcagaggtgggaacagtgtagatgatggtctaatttcaggctcaaccaaaaaaaatgcaggctttggctggcatcctccagggacctagctctgtgctttcctagagaccaaattacactcatcttgagagagggcatgttgaggtaattggtgggagagagtggggagagttgaattccagctgcttccattgtagctgtcctgaaaatgaataggggatgttaacaatggaggctaacatttgacttggctttttcacctccacaaacctaagggtgagaattatagagtactgaatgactgcaccaataatgatcctgtttaagtgggaattgctatgttgggaaaaactcacaccattttaaaaatagttgatgcatttaccaaccacagtcctattactgtagcccaataaagtttatccacagtatggaaacactccttttttttattgtcagccatctagtgtgtgtattggatcttcacctctttggttaccattttaaaatgctcctactgaaagacatttggaaggcaccagaatcccatctccaagaagggaagcaagatacaagtgccctgtactccctttctcctagaatgtgtggtctttttttttttttaaggagaataaatactgtatgactcaatagcttttctaacgaataaaacaaattaaattgatgttacatgcgtatttaaaccctatccagttaagtactgatgtgattaaaataatcaaatgtattacttaaaaaattaaaaaggataaattctgcaccccattattttattgacttttaaatataaattgcagaaatgtttacattcctaatggcattattaagctaaactgacaaatcagaggaaaaagttgattggccagcacattattatttctgcacctgttattacagaagtggaggctcagcattaaaggagctggatggatgctgttttcttaggcttcctttgtgtgatgtgggggttgggataaatgtgtaacaagtgtagtttcactttgtagtgcctttttgtgtgttgatgtgattaaaagactacagtgtttttcatgtcgctttgaaattaatatgcaaataatatgggatattagggcttccctctacctgctgcactaagcttccctaagccaaatggggtggggattggtgtcaacttttttcatacaagttgtttagttgcaaatatcgccaacgttttatctctactctgtgaatttgtaagggggggagggaaatgtcaaactcattgaagtaggattgaagatctgggatgaaaatactttaaatttttattttctacttatatatcagccaggatgttaggagaccttgaaaacattttgaaaaagttgtgtaacattaccaaggctttggtataagattatacttttcttctggttgagttcttccttgtattaatcatgcaatatcatttctcagacacttgagcccggctctcccctggagcataggtggcaataattgtttgttattataattctagaatttcttgggtgttcattgtccgtaattcatttcacacagagaaatctaaactttcttcagccagtagaataaataatgccttccctgtcctttccttttcttttttaaattttgagttctttaggaatgtcattatagtctttgaaacgtaatgacattaaatttggattgaaggggaagggagaggaacttttatttcatgccatccagtggctagtttgagtttgcaaagaaatagatacaatgccattattttctgcaagatactagttaacactattctcatatcagtttagactttgtcctgtgtaataatttaaattcctagattttaataacacttaatatgtagcatggatcccacttaatctccccccggcttcacaacaaaatgtttacataaatgaactctcaattttgatatcaactatttaactcactctttcctgagttaatacttccataattaaacatgttccacagttgccataggagtgtatcttaaaaatgatgttcttctctgttcttttgagccatctgtttgctaggtcagtaaagaaatgggagcctgattttattttaaagccaataagttattactctactattgtattagacattcagcttcagagggagtaaaagataaaattccatcacatttccactttcttacatttgcagcagaaacttgtatgctcaaattggttattttcaactcatgacagctgtgatatttaaaatgatcacagctgttgtgacttaaaattgatttttctattaacacctgagaaaaagacctgtgccgtattaaaaacttaaataaggtaactgtaaaattagatgtgttgatgtgaatctggtaatcctacttcccagaggttgcaaagtgcagcacacctcttgcatgcttccagggaatgagctaaaactgctagaaatagatgcatgattgttaaaagcgtttacattttaaaggattcctgtaatagcagatcctcttggcccaactttacagtgtcacttttgctgataaaatcatttaggattcagtttccttaattaaccccaagaaagatgacttacatgaatcattatgatatcctaacctctagactagagaagctgctttacctttcagatatgacattgaaaaatgcaaaaccatacggaattgtttcttatgaaggaagttttggttttatggtgcttttcctccattatctttagatgacgaaaaaggaaaaacagatgagaaaggacaaatagatcatggctaagtagctttaggctagcacttgtttttggaatctttaatacatttttaatcttcatgttgaagatccatttaacctgttttaaagttagatggtgattcctgggttcagttggtctgtttaaatgtttaccttttcaggataatccgtattagaatcttgcatctctcaatagattacctatttaacaaagtaaccaatttaagaaaacctaaacacatttatacattaagatattttcctgtttcgagttagatgatgtagtatataaaatatatggctggcctgatgtggaattatgtatagacaacagtgtcttcacagatgcattgccaatagggagctatgtagattaaactctttggccagtcctaggctttttacctgtgtaactcaatcagaattgaaagcatgacaggttttatgatgatgaatgtatggctggattggagaaagtatggttgggtgggtagatagatggatagatttcataactagacagtaatagataatgccaattatttattactcaaacttgtttattcctcagaaatttttctgcagagtattattttgattattgcatgtagttcagaacatttagttgaaaatgataaaatatttgctgtcacataatcaagactgctatagagttggttctaaaagttccagagtgaacatacattacctgtgtcaaagttagaggctaagactatggagggccataagatcacaaagtcagactatcacatactaagtgatcatgggtgtcaatggctatttccttgtttagttgaaagaagatactcctcgagatggacattgtttatatgaagatttaagaaaatcaaagtggatatttgttgctgacagactaagattacaaacatatatctttagaacagggtgttccccaggggacatacggcaatatctggaaacgcttttgattgtcacaactgtgggggtcaggcaggagcttgctactggcatctagggctggaggccagggatgctactaaacatcttaacagcgtgcaagacagaccctcagaagtgctgaggttgggaagtcctgcttgcaaagtgatatatctggaccttaagaattaaataatgtcataataagttccataattaaatcttggcattgtgaggcatttatagaggataacatttttttgttttttttctttccctttctatttcccttttccttttcttttctttccttttttcttttgtttccaaaacattgttttttgtttgtttgttttggcatagcacactatagcattgcccaggtatttctacgttttaccatgaaaacgtgagattttatagtgtattaaatattgtacattatttgtgaaccaactggaatggcttcaaagcagctgttagaatatgttgagtcagtaacacaacatgtctgcataccctaaacatatatttgtcttaccttttaaaatgtttagaaccctctatcagtgtaactattggtttgtcttgaatcatcctaaatgaggaagtgtattaccattttttccctacaggacataaagtggaaagaagaaattagcataaagaaactaattaataattatgttttaagttttttggcattacggacattgtttacatcatcattaacatcataacatcatatcgtctgttatcaagaaaagattaaaatttaaagccaacattgaagatgttctttccagctttcccaataatgcaactcctttacctcctcacaactggggacctctctccctgccactgctgcgcttctcctcaatgtggataattcttggccatgatacggaagtgattttgaaacctcagttgccttctgtagcaccctgtggaggaaggtggcaggatctggtggctgagtcttacatctgccaacttctagacctcactccttaggtgccacattttggagctagttgccaagcctcacagtaacttgagccactcttcaatttcctccccatgatatacaaagttctccaaggtttaatgagagtagatatggaggctgggcacgggaatggcagctctgatttgcagtatatctttggtgtacagatatgctttcatttattgcttagcccattagctaatggaatttcaattccttcccacaggcattctcagaccctgcacttcactcttcctgtttccctgtccagcttggtacaacacattctagtaaaatcacactgatgtgtttaggtttactttgtacatcacatctgtaaccatctataagtttgccctaaactggcatttattttgaactgtcttccaccttttattgtacagcgttgtctgtactcaaagtgagcaactgaaaagaaaattttaacattctttttgtgtgccagacaagtaataaagattactatttttatggtaatttttttatttgaatatttctgtttctggaagatggtaatttttttaaatcatgaatttcctgtaagtgaaactatttgagggagtattgacctttttttgatcaatcattgattatctgtgttgcactctcagtatttctcttatagtccatatgtccctctgaataattgtagaacaataacttgcttacacagtgtttttagaatatgcttcaggaagcttgcctgtgtggtatttaactcagacatttatggagtataaaaccaatcttactgtgacttttaattattaggaaagtggcttacagttaaaataaagcttacagaaaatattgtagcaataattaatatccagtaaaatacagttgtaagcttcggttctttcagacattttctcaacccagttctaatttgatcgttactgcacctcagtaagataggtgatgcaggagtcatcatcccatttcacaggcaaagcctggcctgttcagtgaggtagccactggccccatgtggctattaacattcaaatgaaggccaggcacagtggcttatgcctgtaatcccagcactttgggaagctgaagcgggaggattgcctaagcccaggagttcaagatcaacatgatcaacattgggacaccctgtctctagaaaaagttaaaaaaaaaaaaaaaattagccaggcatggtagcgctcatctatagtcccagctacttaggagattgaggcaggaggatcattgagcccaggaagctgaggctgcagcaagctgtgatcatgccactgtgctccagcctgggcagcagagcaagaccctgtctctaaaattaaaaataatgataataataataataataaataaatgatgtcagtcaatgagaattaaataaaactttaaaaagatcacttccttggttgcactagccaagtttcaattactgagttttcatatatgatcagtggctactgtattagcacagatacagaatatttgtatcattgtagaaagttccatggggaggtgctggcctgggaaatggaagcattgagggattaaaacttgctgaagatcatgtgggtcatgacagaatagagtcattgctgctatatattccaataggatatttttacatttttcttagctttattgtcaaatatctgatgtaagaattgacattttaatgctaccttgtagcactttactgaatgcttatctcaactgaatttaaatttagagcttgagttacacaaacttttcaaaggatacagccctttgcctgtctgcacacaatggggaccttgaatttccagccagtgataccctccagaagggaccatgtcttaatgcatctttgtagaccttttggcatattgtagacaaccaagaaatgtttatgcagcctaatgaatgtgtcacatccaccatacgggcatatgtccatacatacagttagacaagacctttgggtagaatgctcccgagagagctggtgtctgccaaattttacagagctcatgcctctgctcttgctgttttagtaaaaagtagtattttatcaaaagttaaattgggttcaatattcaccatttgggtaatgggtacattagaagcccagtccccagcagcatgcaatattccatgtaacaacaagcacgtataccccttggatctaaaattttttaaaaatatgtatttactcacataatccaaatatttttcatagtaaatgaaaacgtctgtccatcttgtccttagcagtcatttagtccctaacctgactttgtgttgttataaagttgtgtcacttaagtagtacttaagtaagtacatacctacatccatactatctttccatttcctgcatcactgagttggacaaatgtgcccagttagcgttggtagtgctgaagaccatgttcattcatacatgcactcaaaatcatattaattacttttcagtgataaccataggtggcaacagatgaatgggctagccctaggctattattaagcactgggaatgagattgttggtgccttgtacctgtgctactttaacaggtgagacaattccagagctttccccatcatcctctcgttgctacagtctagacattgggagcactggaagcctatggtgacacagactggcagatgccttgggcttctaatggtgtatatgtaagccatcattttgtttgtaataattatggtgttgagaagcatttgtgtgctgtgcactctttcagcttgtgccacgtttagttcctgttatgcaaataccactttaaacttagaaattccaatttgcattaatattttggtttcatagagctaactattgcatttcacaaacaagtgcattttaatgagtaccggcagaatgatttaaaaatgttatttattaaatactattgtagaaaatgcagtctttggttgccagaaactattaagacgaaatataatgtgtgttgaggccacagagtacacctcttcaagagtatttgacccttatggctttcagtgatacaacagccaatgctcttcatgcaggcttggagggcagaggtaattaatataaaatagaagccagcgtaccattgacgtttgggtttacttttaaaatgtaaacatatttttactatttgacatttgtcataagaccataggtcatttacctctgagttaaggtgaaggactttaccagtcataaacacccaagttttaaagcagtgttttcttatatcttacatcttgatgttaaatcctgaaatggagtttgttgctgctttataatttttttccctcttcctaaaagcctttttttaaatcagaattgtggataaaaaaattttgatgtacaatgtgtgggaaaataaaaattttgcaactggattttcagaaatgaactattttaacacatggactttgaatgctgctgtcatggttgtcatagcttgtggttcctaattataatgagcttttttggtggtgttattgcagttgttttattccccctgcccccacccagtcttcaactcacttttcccagaaggagagttccaagcctttgaaaattctcatgattttgcaaatccactctatttttgtctagaatacaggaaagttaaaactgtggctggtatgatgccatgttttgaatccaattttaaagcaaccctttgcaacccagggagtaaagctgacatctttgtatctgtaatgaagataattatacctgcaaggtgacatcactagcaaagtaacaaatacccttgaaaacggagttcctggtcttctctgaattctgtagaccacatttggcatttaacaccagacacctctttcatgcctgtcgtttgagaagttgctttcagatgaatttactaaagctgactgacacagggttaaattaattcttttctttattactcaaagtgatacagacctttcttggactaatgtagcttaattagtggtcaattaaaactgaacattgctgaattgaagttctttgatcaaactccctggcatgggcttgctttctttaactagccaccatcttgaattcatttggaatcagtagtataaacaagttaaaaactggttcttttataagaaagtcagcaggcttgtatagctgtggtttctttttttacttctgtaggcggcaattcaaaggcatgctaaatgaaaacagtactacaccctgaaaaaattacatttttaaaagtaacactaagcagtcagaaaacagtcaacacccttacctgtttattctagatacatttatcttctatgtagaacaaataattaataattcacttcccaatttcagtggttgattttgttgttacatggaaggtgaaaactccccaccctcccttgcaaagtctatagttataacaaaaagtgaagcaaacaaaatccaacctggttgttgggagtagagtcggaaggggcacggtaaatgaaggtgtgcccagttgctcctaaattcattctttgtcactcttgggaaaatagttcacctctgtatctttggagtgggagtgacacactacttcatttacttattgatttcatcatttattttgaagggcattatcctatcagtatggaaactgataatagcatatatttcatatgaatcacttgattaaaaatacacattgcttttgttagaatttgggtgaagttacaaaaaaagagaattaggggagctgaaaactggggcagaggaaatcgtaagcattggtaataagatcacccacctccatttatccagttacatgtcttaatatttaaagtgtatataccattcttgtctaaacataaattgataccattccgtaatcctagtttttgaaagcttaacaaccaaaaacatacatcctagctggcattcagttagtgctgtgcattctggagtattaattgaaactggtacttttgtactggaaataaaagtaatagattaggtttaaatagataatttgcttagttcatagtgatttcttctggtttttggaaattttcacagagaaagagttaaaggaaatttggaagtgaccatgtacagtgttccccctgtaagtgacagaatttttgtggttttcattacttagatcgaaaaattgtagttataatcaataattaaaattaaaaattttaccagttgacagaaagagaaattgtttatagtcaatgtgcctttcagccttctctcttgccttctccctaaaaggctgattaggatgtaataattggggatgatagcgggaggaagacgacaattccatttaattaaagataatttattttacttcaaattggtgatgtcccacatgaataagagtagctttagcagatagatttattaatgggtactgacatctcagttgacagaaaaagcaaacattttctttcctcattgtttttattgtgtcccgtcacctgaaactgctgtcaccatgcttcctttgctgcttgacagagctgtagacttttccaccaaatatgcaattattggtttatcattgaaacaaagttgatcctcttctgagttaaaaactaggccaggagcttgaaaggcggttcaggctttcagagctaatgctacaaatgctctcttcttaaatcacattttctcaactgatccttcccatatctagttcatgagtagattgaaccttttgaataaggaccaaagatttcctttggtcttgggtgaggtgcttgcatgaatattcctttaataccttgaatgtcttggataatgaaatgtgccccaaaaaactaccatttgcattacttaggttcattcctgacaaggaattctgccctcgtgtgatatgttcgttgttgtctcatgcaatcgtaaatggatcttggaagttgggacagttttttttaattaggaagtagattcaagaaatgcatgatattgtttttcatataatctcctcagtctatagtggttgtaaaggtgtgctgtttagcatacctttagcaaaactgtatttataattctatgtatcttaaggcactttttaaatgcttctgacaaactgcattctgtttttccaatgtctatttgatctctgttacattaggcttatttgtcttactctcacatcgaattcctatatttttgtttatgttttctggtgttcagtcatttctgtatgcttgcctagtatgtttctttcataccgtcttcttcactgaatgaaatgcagaccaccttggccacttccttccttctgggcttcttttcctattcacaacttccgccattcacactgaccctctagctttacttatatctattgctcctgctgctttgttgctctaattttcatatatatttcctttatgctaatatcctttccttaactctttggatttcactggtttgtctttccagctttatttagaaaattaggccatataactaatgtttacaccgtagaaaggaaaatgagattctttctttcttttttggaagtgaagaggtgagaaggttgtggtagaggttttcttttattttaaaccagatggatttattttgtcctgctttgctatttcactatttcaaattgattttaaatcagtgatggtgttttcaaggattaatttttattaaatcttgattttcatgtcgtgttaaccttttccttcccctcagccaaagggtcttcttccttttttctgtccatttcacttgtttgttttaataacctgatctctccagccattattttatcctcaaatcctgccacttttatccatctttttttattgcactgttgtccttacttcaccttatatcttttcttcttctgtaattattacagaatccatgataccttctccaaaattctaacaaagaattctggaaaaggagaaattgggaaagagaaaaattgcaagtaatgttctttgctgagccctaggaagtctgcttggatttttatattcgactgatattcctccctagagttgcagtcatgattctatgtagtagggacacgaaggcaaaagtttaaatagactaacactgacccttaattggaggtgataatcctacatataaactttcaggagggaaagcgatcctgcattttacatcaggtaaactcagttgcacccattgccagtagctgggtcaggtgtgtaggggtgtgtgtgtgtgtgtgtgtgtgtgtgtgtgtgtgtgtgtgtacgtactgggagccaggttggaagtaggaagagaaggaggttcttctttcctctcccacttgcaagctattttctttcttttctgtctgttttcattatttctatggcaagtttacttgccacgtcttaaacaccttcaacctttttgtctcttcctttacttttttgctttactgctatcaaagagttaaggaagtccattaaattggaggccattcctcaccataagagaaatctggatgggatgcttttgacaactgggctctctttagtagcttctctctacttgggaaaatgtcagatattttgagaaataaatgcattgccccaaactgaaaacaccacttttattctgtaaaagaggcattcagggaaggagacctcctctattcccaggaggtcacaggaactgggagtggcaagaaggaagctgctaaacgggctccagatgcagctttatccaggggacgcctcatgcctggtcatttgggtggctgggcttgtcccacctccccttcttcatgccctcctcccggtctcatcctaggccctcccacccctaggccagccacaggcctcacagcggacatctgcgggtctgagtttcatatatccagcatgaagttccctctctccctcccattatgaattctgggctgtggtcctgcttgctccttgtgtgtcagattgaagttctgatgctgtcagccatgtctgaccaatcagcaaacaacaccacaggatgaaatttaaacaatgcagatgctcagatacagggctatgttgcctggaccacgaagggaaagcagaggtaaggtcagagtctccccaaagtggtctatcctgagcctgcctgacttgacacctcttgggctgcactgtgctgctttgacttgtatgttacccatttgctttgcactacttctgtcttccctggcattcaccagaactttcattttaattcgctctgcccgggttactttaccaccttcatctgctcacgtccttttcttttggattggtgctgactgtcattacgaatgttcctggattgcctcgtggccgagggtccttggcaagtgccaccttgttcaggtcttttgtggccagacttttaggaatagaggactgctgaggatcagggcaaacggacggagttaataggccttattaattttccctctgcaggacagtggaatttatcattcggttacaaccacggttttgtttcttaccattgtgatgtattgaattgtaaattgagcttaaatcatctttttttctcagaaacggtttacttagaaaagatataaatagatacaacctaaacgaggatgaatcagctcatcttccaagagttttggagggggagaaagggaattgataactctcccccacccgaatccccccccacttttttttttttttttttttttttacagtttttggtgttagctcactagattactgtttgcaaaagaagaatctcatcatcatcctcttctgttttaagtgtttacttggcccttttataatttaaagtgtttacacggttctgtgctccctaggcccatctggaaaatatttaaacttcataagatctataagactagaatatcacatataatgggatagggggaaggaagaaaaattagagccgttgcgtgtgtttagaataagttagttgtttgttcagaagcggctgctggaggaattggaacaaatagctgtgtgcggtgaacgattgggtccagagctgtacatttcaccacagaatgagccttggtttgtgaaactgacattctgttgtgacttctaaatccaaacaaatctctgcaaatttctgcccgatcgagttaataagaaaatatatacatgcagaggcgagagccgtatgctacttgtacttctgtcagtgttggtggaaataagagacggattttacctactgtattacattcaaccagcaattggcagaacccccagctcagcgggttttcttgacttttttttctgctgtgagaacaatgggatgcaaaagggcttcagaaaaggagagcagcagatacgggattggggtcacttttcttctaattgccttgtaattggggagtggtttccactttcccactatctcactggtgggaggggaggaagacagatgtggcttagcggtaacgagctttctccaggccggatgtgctgagggaccaggggggtcattccctgctctgggcctgtgatctgcttcacacctgtgctcattttcccccatgatcgatgaccttgtattaacccagagtgaccttttgccttcgcctgttctctgggacgagctcttggctagtggaccctcctttctctctgatttacaggtggttactggagccacatacacttgtttttcatggtgcactgtgcacttagcagcccggcaagacctgcaatttcatccctctcaaggggccaagcaggggattggaaggtgggagggaggagggtgccgcgagagtggttgctgtttgcatgtgcttttctattttgtggctcatatggtatcaattaccatttgatggcaacgccaggcctgaggcccttcgcatgtttgtcctgtgagaaagatctggaagaaccgacatatggttttgattgcagcaattgcaggttgatagaatgaacgcaggggtgaggtgggtgggttttccttccggccctttccactctgggttgctaatgtgcttcgcttgtggaactggtcttttcatcatccagcccctcccccacttacccctcccccacccccaactccctgccactttgcattccctgcccctgccttccaaatgaccgccaggaacatgtggcccacattaaggaccttcaattaaaacaaacaaaaaattgtccactcttctgttcagtcccagagcaggtcagtccatcaagatggttggaagtgtaccacagttaagaaacaaatggttggcatagggggcagattccctccagaagcttgggacatgttttaaaatggctgttagttcagattgttaaacatcgaaatgatgctgaaaaatagcagcaatagagattaatgtggggtgtgtgtgtgtgtgtgtgtgtgtgtatatctgtatgtgtgtgtatttcatttaagacacctcttggaatctgtgcatctgctgcatagggacaggaagatgatgataatggataggagttctttggggttccatctttctgtacatcccaggccataagatgatggaaaagcaagtgaggcatgtgtgtctctatgagcatttcccttcagaaggaagatgttggagactcatctcccatgcacagtgacttctctcttactaaatttgtgatggtagggggtactcctcattactgtggctcagcagggattgcatctgtgaatatgccaagggagggtctactattggggaatggtgagaggcaaagaggagaaaagaacattataggcactttgaatgttacccagcaacattttttttgttgtttcaaagtaacatctttctataatgctttcaaatttacctgtctggtaatctgttctaagatgggcagcccatgaggttttgacttttttcactttggctattgcatttcaaaatattactcacaattaggaatttataccatttgaaacaataatgtggtatctcatgagtaaatgctgccattaacatcttccttcttttaaactgaaaacaagcaaaccagacccaaaaaaaaaaaaaaaaaagcagaaacatgctcccccaagaaagcttgtttttttctttgagatggagtctcgctctgttgcccaggttggagtgcaatggtgcgatctcgactcactgcaacctccacctcccaggttcaagcgattctcctgtctcagcctcccaagtagctaggattacaggtgtccaccaccacacctggctaattttttgtatttttagtagagatgaggtttcaccatgttggccaggctggtttcaaactcctgacctcaagtgatccgcccacctcggcctcccaaagtgctgggattataggcgtgagccaccacacctggccaagaaagttttttaaatgtgagatgaatttttagttttgaaggccagctattgaaacctaatcacactgcttgacatacttcttcatatttatctttatattagagctgatctttatcaaaaggtagtagaaactaaaaaacttaagttattgacctaaattgtagggaaatgtctgtctgatcgactctagagagaaaattggccgtatctttataatggttactgaatgtatatcttcatgaggctacagtttttttttctttgctccaactttctccttatgatgtagagattggtgtattaaataatcactttttcaacagtcttgatgacaattttattttgctatttcataatcttcatacaatgggataagtgttttcagagatacgtttgaattcagagcaactggcaattaagtgatttgctctagtcacatgttttagtagtagctatttggttatttgcctgatatttaatgcacacatatgtacccttaaatcatcattcagtgtgatagcttaagacaacatttctgtttgctgctcatgccactattagctacgtttgaagagtgatatactgagaagtttaatttgctggggtttttttctaaaaacattgctttcctgaaatatatagtattgggggctcatagcaaaaaaaccgtagtatatgggttgtgagcctgtcttcgaacatggtgggtcacttaacagcagctgtgctggagagatatttgatttgagaagactgttttgaatcttctcagccctaacaccattctggttttgaaatgggaaaatggaaaagagttttagggaatagagatatctcagccttgaaaggaagcataggtagaaatctttcagttctcactcagatgaaccagcattcctaatctggctaccctcacagaggacaaagagtctgctgggaaatgtgggtttatatttgtagagacacacttcagaggcatgagatagtgttagataccgactggatgcttcgtgcccaacatcaatttggtttgcagattgaaatttaggaaagcttgcagaggagccaatcttttttatatacagcacctttaaaaaaaagactgtccactactattaaaatctgattcagtcttctaaaatattactacattcaagacaacttttaaaatgatcaaatttagatagacatcaatgatgttaaaagataaaagccctcctacatgtaatatatagtgtcttaaaccttattttttaaaaaagggataccacttttgccaaaagtttcaatgtagggatactcaaactgtccttggaagtcctaaaaattgctagttttttttttgtttgcttctttttttgttgtttttgttttttgtttgtagttattcacaaatggagaaatatttataaaattatattataatttgtaatgcacgcaaacaaccatcagaccacacttgaatcagagagttacagttataaattgaggaaagaggatgccagcacaatgcctaatggagtgaaaaattgtgcttattttcacaggactctcttggagaggagctaactactttcctctctcttaatacccagaccctctccctcagccctgacagcacgttacagaatgcattcacttagtgtgtgaagagctagctcaccacctccctttaagatctattcttgttattcatacattgcaaatttgtacttttgtatccacaaggaagacattactaacttcaagaaaggcagtgtcaatgaggagcaggaaaatacagtatgatacaagcctgccaatgaaagaattatactcagactctatgcgctctgttaaacaaaatttgaacctttgaggaaaaaatattggggattctgatgagtgtttttactctttctttcctttttttttttttttctatttggaaatcatggcttcctgatcctaagggataaaaaaaaaaaaaaaaaaaaaaacctcaaagaaaagactcaacaggctttctggacatcaaatagttcctacaaaacaacattctgatgacttgcatgtaaagaaatcagaaacatatgaattaagcttctctcgaaatacatatgggttgaaaaatagagagaagtgctgagaaaatgtgttttgggttttgctgagcccatgacgtttgaaaaatagtatgagacattgaacaaacacaaagcatggcttggctcacccattcctaatattagccttctagttcaacggcaaatcagtttaccatgtgcctaaatgtgagccaccttggtgcactcccccacacttaattatatgcagtttaaattttttcaattaggagctcaaaaataacattgcatttcaaggaaatgcaaatcttagcattttcttacctggtttgttcacctcagaccattttagaaaacaccacagattatttcaccttaggagcagtcacactgatgtggccctctttgatgtggctggcatataacagaagaaacgtatcatttttaagaaactggctccaaagacaatattgctattaaattgaagccaaaaaccactgcaggtaaaacatgatgaagatgaaggacgccctctcttagccatatagtagaagcccgatcatagactctcacccttacaccatgacttgagttcctgctcatttttatccctgagctctgcagacttctaagcagtggaagttttcattctctttcccacattgcactcaagagagctaacatgagagattctaaatcctgggattcctctgcatctggctttaagtacaggagcagaacacagggaatttaaggaacaaaaatagccagagcttcaggcttcttccactgatggtaagtcattgacatgcacttggatgaaatcctgtatctgttctttggactagcactatcgcctgagattatcagtttcagagagttacagagaggcagtagatttcatctttcctatttcaggaggagttattttggttgtttaaaaaaaaaaaaaacactttaatgtacttttcctaactccttcactcagatggtggcaagaagtttgacagaataaagtaattcagctaatatttatcaaatgcctactatgagtgagctgttagaatataaccctgaacaagacaagcatgagataggcaaacagactattaaaacctagactgataatgcattgattggggtgtacaggctccttaaggtagatatacaaaggacaactagtccacatttggccttagaggaagtgaagtgcaaggatgaatgggaattaagctggcaaaatgcaagggttataactggaagcaggggtgagcatggcatatccggtgacccagaagtagttcagaatgccagaagcttatggtacaaaaggataacataaaagatgagactgaaaaggtaaacagtggcctgatcaaaaagcgacttgtgagccctattaaggagttgagattttatcatgaatgtgacgaggagcctttcaaatgggtatgcctgagaagtaattgaatttaaaagtcaagacggataggaggacctggaaaacttagagtcagagaagccaagggaggcagatctgaccagaaggaggaaattgtcaacagtgtcagatgttgctgaaagatagaagtgacatttggctgcagcatccaggaggtcttgagcagtttcattgaagtagtgagtgtggaaggaaggtaaagaagtggagaacaggcattgcaagataattttccatcatcgtcatcatcatcgtcctcatcaccggaaaatgagcatcaattatcttatctaccagacatagagagtgaccaggtaaggaatgacacacctgcagcctgggagatttcagaaaacagatcataaatataaaacagaagacagcaacacatggtacaacacatgcaaagggcaaaatgagcagtgtaggccaacgggatgaagaacagaaagaattagggggcaggtgaaatgggagagtttttcaagcagtcagtgcgcttgaggtttgcattctggattgtgcctccttataagtcagtccaacctgtttttgattctccatccagtggaaataggaaacaccatcaaagatgatgcatagtcttaacttgcctgtgacttctgattatgtttccgaattttgggaggaagattaaagtcataaactgactcttggtttgttataatttcttgcaactgttattttaaaaatccggacacaggccaaggcaggaggattctctgaggccaggagtttgagaccagcctgggcaacatagtgagaccctgtccctacaataataaaagtaaaataaaaagaaaatctggatgcagaaactgaggtgtagataaatatagcaagtcagagatattcgtaaattctacatcgatgagtttcttgagaaattctgcacacccagtgctggacaactgtggaattgcagcgtgatacctttcacatctgggtcatctccatatgatatcttcttcctggtacaaggccagaagttcaccccacgcacaacacctatggaagccacttacgattcaaaggacagtttttctgaaaaagggtgcatgatgtatacttcccttcaacactaaaattctgctgcttaaactttgtaagtgaaggaaaggactggttctcttctactttggctgtcttccttgtttcctatttattgggtgcttgctttgggcaacccattgtattggatgtgctctaaaccacaatctttgctcctaaggagtccgtagtatttatcgggggatacgacctggataattcatataagatatgaatttctttctttttcttttttttctttttttttgagacagattctcactctgtcgcccaggctggagtgcagtggcgcgatcacggctcactgcaacctccgtctcctgggttcaagcaattctcatgcctcagccccccaagtagctgggattacaggcacccaccaccatactcagctaatttttgtatttttagtagagatggagtttcaccgtgttggccaggctggtcttgaattcctgacctcaagtgatccgcccacctcggcctcccaaagtcctgggattacaggcgtgaaccacaatgcctggccaagatatgaattctaaaaaaaaaaaaaaaaaaaaaaaaaaaaaaaagtccttggaaagtttagaagatgaaatacatttaatgaaaattgagctcattcttccccaatatttgttccatattcctctccatattatactattagtacacaatcctgtttggacttactggaaaaaagagctgaatagcttatccacatgtcaagaaactttctgtttaagaacactgaggttcatcaacatcaaaaaatattttcagcatcattcaggcactggacatgctctacaaattaaataccttagggcccctactatttcagtgttttctcagtgtcttgttgcagtggcaaatgctatgaactacatttttcaaatgaatattgaagattgagaaagaggttaagaacctctatctattaacgatagaaccaaatctagaaagatgtctcctgctctgtagagcacattagggatcattatttatagccatttggctctcttaagacattttggcaatgagggaaaaatcataggttgattttcttggtggaatgaagaacattgagtttgctaacaaagagagcatgagtgactttggtaagagagcagtttttatttcagtggaaaggcagcctcctctcctaataatagctacattatttacctaaatgttccatgtagcaactgataacaaggcttactgcttaagaaatttggccatcatcttgtcctctctactagaattccatctgcctacagatgggcccttgctaatattttttttctgaaggacaacatgtaacttaagggcccactactgtgtgttattttgtttttttaattgaggtgaaagtcacataatgtaaaattaaccattttgaagtaaaccattcagtaatatttagtacattcacaatgttgagcagtcaccacatctgtctagttctaaaacattttccccagcccagaaggaaactctgtatccattaagcagttccttcctatccccctacttctaggctttataaacctttaattttaatgttatatacacacacaggcatacacatacatatatgctatacacacatatgtatgtatatatgtataatgtgtgtaaataatgtgtaaatatagacgtataaagatgtataatgtgggtaaataaatggatgtgtgtatgtgtatatacatatatgtacatgtatacatatatacgtatatatgtatacatatatgtatctacgcacatgtatatacgtgtatacacacacacacacacattcatgtctatttatagattaggaagttccaaacagaggacctaatatttcctaattatgtaaacaaagaactatctactttaatgaatgtttctccaccaggaaaaagaaaaataggaaacattccttgcttcttttaacctgtctgtatatttctcttaaattctcactagatgctaatttatcaaggaagacaaaaaagacagaaataatcctgagccttttgttgtgtaaaactgctgctcttcttgtaaagacattttctcattaatttcatcaacactgagaattttaaactgcttctcaattttaagcaattgtatgggttttacatttctatttttgaaaatccaaaattattgaacaaagtaatttagttagcaaagtttacatttcttggaaagaaatatgaaagggtcattcttactataatttttattgttaaagaaattgctgttgttcacatgtatttatgccctcctcattccggaagaatatttgaggtagccagtagcacatttttttgaattaagaaaaaattagatcaaatgaaaaaatacctaaaatttaaatatttagagaaagccaactcaattatattttaaatatgcctgaagtcgtgaactaactaatgttgatcatttagtcttctggtcctatctcaggaatattattgcccttcttaattcatctttcacctcctttaagaagtatttctgaataaccctataggataacttcctttacatttctttagctcatatggtttatacaaaaggctactcactttatcacattttctagttgcttattgtacttcataaatctcccaactagttcctagtgaaaattctgcccttctaattttttgtatgtaatttaccaaagcacctagctttgtgctagctaaaagctctgctctgagttaaattagtgaaatattgctggttgatttcacctaaaagtttgccccgggcaggagggaagagggtgggcatttgaatgggtaacagacagagaagcagctgattggacatagatgttgacaacttgcatacttatttttttcatttcaatctgtgccacagagtcatacatttggtaattatttcatgcttttgttttcagttgaaagtagttagggccatatgttttgacagaaaaaagataattcgtactttttttcagctttatgaaagggaagatggggtaacaattttacagtgtaccatggcagtgattcctgttcaaaactttaccagattggaaactcactgttcataacaattctcttggtaagcagaagatgaaggcatctgtttaaagcacccagagttaagtttgatgcttcaaagcacagcagagttcatttataactctacttagcactattagatatctttaacaaatatgaaaagttgtccaccagattccttagactgtaggtgatttggaaggatattctggtcaagtgctaacttctgactgaggatttcaaatgaaaagacctaggttataaccccattcctgcccttactctgtcttgtgactcatggaaaaggaaggcacttaacccgctccaagcttatgttcctgaatgtataagatgggtagcatggttgaccacttagacagataatccatctcaaaatgatgattaaagaagataatggatgagaaaagtccttttgatttaaaatactatgaagatgtgaacttttaataatgactaatgatagaattttgtcaaatttgctttacgtaattaagttcaagatcaaagaatatatctagagaagtacctatgtattttgtgaaatgtttctttgagtattattattatcattttatgtctgttagaatcttggcctcactgtcttttcattcttgcttgaatgtcgactcttcaaagtgtgactttctgcttgtgtctgatgcaactttcttcctgatcgctcttgcttcctgagaaggaataggtacttaggaatgatggctttttggctgtctgtgcttattaggtacaaacacagcactaaagacatttgggactggagaaataagaagagcgcctttagggttgtatgcaaaaggtcaaactataatgtagttagcatttttctttgtactgctttcccttcttgtaacaacctctcaataccctcataccttctctgctttccagaaatgctttctaaaaattgattattgggaaaagatctgagacctcattgccctgaagtgtaattactgctgacaaactgtgacagcatttcccaaagacagggagtgattggagatgtgatgaaaagtgggtttgtgactgtggaaactctttcagggatgtaggcttttacccctcttggtaatgtaccttgacaaaagtctgcagcaatgaaattaacttgttcactccaatcgcatctaaagttatttgagcttaagtcctttcttaaggatgtcagctttaggcttcaggcatcaacctgtggactagaattcaaagggaaaagggtagggaatggtgctcttaaaatctttaggaccattataggtaattccatatcctaaagaaagctcagccctaaacacattagagaagtggaatgcactaaaatatattttggcagaaccaatgaatgtttatctttctctgtgttatgatgttattcttagtttgacgtgtatcccatgtgtggtgtgtttattcattcatgcatgcatgcacttagtaaagttttgagcctattctgtgcccggcattacatgcacacacacatatgtccaagcacacctgcacatttttttttttttggtaatgccttttttaccttattgtttctgcaactggctatccttagcaggccttcttaatgtacaatagggtatagaagaaataacaatcaacattggagtaaacctaaaattaatttctgtctttattgtagagtcatagaatttgttttcctctggaagatgtgctgccctcatttaattgataaaacagtgctttcagaggtcacaaagctattttttggcagatataaccaaacctattttgatgttccagcacctcctaatgaagcagtagtcgtcatctaaaacaaaaagcagtcggttgctaaaggaggagaaagtgttgagatgtgagatgatctgttagacataattgacaatcatgaatttgatatgataggtgtaaacagagatagaaataatttagttacatctgtttaagatttaagataaccagaagcaataatgtttaattgaaataatatatcaggttctccttaacattaccttgaatttcttcacatgcacatcaatgcatttggtaaataaaagtttggaaacaacttagttaagtgtttagaacatattagagttgtgatgtgcttagcatccgcagtcttttatctgtgccaaccctgagcctggtaatgaagccaactcccacatgaataagtaacataaggagtgtaaccaggaagaagtcagggtttcacctggaccaaattttaggcaattaagtgtttcaagagatctttagccaggtgtaacttaatcagtttaaggcactctcagctagggccaaggtactcataatgttggcagtgggcattcgtctgatacaccacgttgaaagtaataggaaacatagagtgtctgctcagttattgccaagagcaagagaaatgcaggtgtaaaaatataaagaagtatttggagccagaggctagtacacatagacaagactgtatttacacttggctttaatagttcagataataacatggtggtttttaatcagtttagtgtgctgatatttagtcgtgggtctggtttcaccactaaaccctagtgtaactctcagccggttacttagcctctctctgtctctagtaatattaaacaagtgtattaatacctgctgcatcttagctcaacttcatgtctggaagacagatgaatggtcctgcttcttgcagtaacacacaagaacctcctttgtgctgccctgactgagatgatcttgtgttcttctctacgggcaaaacagccctaggctgctaaatggccaggcagtataggggacttaggactctacaaagctgggttttggtaggagtccatgagcaccgcggagagaattcttagttatcaggagatacggttgtagtacttaaaaactcaaactccaaaacaagactacgtggttttgaatctcagttttgccagtttattagctgtgtgactttaagcaagttgcttaacctctctgtgcctcagatcccttagccataaaattgggatgatcatgcaacaataggattagtatgtaagcaaaatgagtatatgtacagtttggctgcaatagagctgataggtgtaaacagatataaataatgacttcttttctgaaaatgacttcttttctgtttttctcgttggtgatccctgcttatgtcactgggatggctgcgggaattcagtaggataatattggaaaatagcttaaatctcaaatgttctatagctatgataacatcactatgacgtcatagcagagtgagtccactcacatctctcctggcagttttgctgcctcagagttggaataataactcactgaaaatacttccaaaatagtgagccactctgcagatttaatttgtaatattattctttctaattattagtggctctgtcttaagttcctttgttttaattgaagcagggttttttttcccccttgtaaatttctatacatgtcaaaggctaccaactcatttttatttagagtttgaaatttgatttgaaaaatatactgcagccagctatatgaaaaacataagaggatattgttgacttttgatgaagggaagaaagaacaaggtagagctgcctagccatgaagaacgccagggtttttgtaacccctggtgtgctttgcacgcagaaggcacacacttaaattggcatggctcactttttttactgtgcctttgctgagcttgctgcaggctgagtgcactggtagaggagtgcagggctgtgttctggccatccctgcctgctcaggcctctcctgctcctttgtggatcgcccaggtctctgctgcttcctggtgccgtctcctggatcctcttgacatttttccgttctgtaatttgattgacagttacagacaaggaaggggactgaaattcttaccgttttgtgacttcctaaaacgggaaaggaaatttggtgaatgagaaggggaaaacgcctcttggctgaaattatttacaggatttagccccaggtttaatgtactcatgaatgaataatgactcagctgatatttagaagccgggaaaattatgcgatttttgtgatggggtgtatagatatggatgtatacttgaagtggtttgtgttctaaatatattaacatgctcagggaatttctttttggggaaatacatatattctttttcatagatttttgtggtgcattctggtagacggaagatgggtcattgctcagttagtaaaaatgaaatatgaatatcatacacataagtggtacattttacactttttgatagttgtgaaatactctttttttttcagactaccaataaagagaatttgaggagtaaaactcttcttaccatgaattgttttggggcacttagaactatttagttaattcttttaaatactccaactgatttagatagaataaaagtgtcacaattttaacagcttacaccagtgaaatgtttccacttataagaaataccctcttatttgtcagcatactgaagacatatatgtgttatttctaagcacatttcctatttatgtgataatggagatcgccctttaaccatcacttggacgtgaaggaggattcttcttcctccattagtaaatattccttgacttgataatactgaaaatatgtgaggtgaatgagctttaatcctgtggtttggtttggtttttggttgtttgcagtcttggactgttcacctgcactgtcttgtgcctttgagtatgattaactgccttgacgccttacagtgcattacacaactctacttcttccatttcttgactaatctctcatgctgtttgactgcccattggaatctttaagttagctacttaggaaagactttaggaaggagaatgctaagagaactggcagagaagtcaggagcctgggctctgtccaggccctggcgtaagtcctttcacctcttcctttgactcctttacaaaatgaagttgaactcattcgagctttaaaaagatgacgccaagaggcaagacagagggcagtagatgtgaaagtaacatgaaagagaaaggaacatctgaaaaaaaaaaaaaggtagaaaaagattttgacaaatagtactaaaaacaaagaatatagaatagagagacccaattatactgataattacaattatcagtattgtaaaaactacagcaaaaaagctaaaaacatattcagcttttattgtccataaaaagtgatcacaccatgtctaactgtaattcgtttgtcaaaaacactagaggccaaggactaaattgcggattaagagtttcttccttttatttcctgcatatccagaaacctggggtcatagatactcttccatggtgtgttgtttggcacaacttgcaagtattttggcagatggttagaaaaaaagactttaagaaatatgcaatagtactcaggactctaaatataataaataaagctaagataccagtatcctgccattcattacaatcaacatttattgaacagcagttatatgccaggtagcagggatacctagaacttgcccctcccactagcactccagaagagttcctgctttcccagcctaaagcaacagcaagtcttacatgagctaggcttactgtgatagctgtcctgacggcgagtggcaaacatggcccagtgccttcctcatggatgaacatgactctacactgggactccccggtagacctttttgtgatgatgagaaagtcctgtgttggtgatgttcagtatggtaactagtgactgtatgtgctgttgagaacttgaaatatggctactgtgactgagggacagaacatttaattttatttaactttggttgagtttaattcaaataactacatattactaatggctactgattggacagcagctttctagacccattgttaaaaataattataagcaatgagtacctcttatgagatagaattaataatcccatttattgagggcccatgacagattaagaattatgtttgacatatattatccctaatcctcacaagaatggttcatttgacaaataagataactgaagttctgagagataaattgctttgttatgtcctcgcaaggaattgtgagagctggaatttgaacctaattggtcagactccagagctgggtgatttctagtaatctgccaaatctgtgtatgtactgtccggatgctgtgtcttctgagtacatcttctccttgctttatggattagttagcaatgtctttatcttggtcacataggacagttacagggtccatcttatctcttctgaatatggacgtatcactgcactggaaccattcatttttcttactgaggcctatgtccttcaaaaaatattaagagttgagggtccaacccagcttcttgagtagtaagctaatcacctacaagtatatttccccagtagatgctgagagaagcatcaaagtacatgggtagttctgtggacatcagtggcactcagtaaactcttggcatttgagtgtttaactgtcacagttgaggatatctgtgaactctcccaaggcctgagtcactgaatgagcccagccagtacttgggcgtctgtggctccattctgctttgctgttttctgctttccatggaacatacagtaactctcttgaagggtctgaaagcctcaattacaacgtttcagtgattctgaactgatttttctttggaaagtatatatgcagatggtacttgcagaatcaccagggggtagtaacgtggaggagtggtaaaggtctactggacaatcaggtggctaccacccaaccacacatggtgatgtgatatgaagccacttttctttattccttcagatttaaggtttccccttcaggaagcaggttacttaacaagtacttgatttcaccataacatgcattatgacattatctttttttcttttttcttttttttttttgagacggaatcttgccctgtcgcccaggctggagtgcaatggcacgatctcggctcactgcaacctccttctcccaggttcaagcaattctcctgcctcagcctcctgagtagctgggattacaggtgcatgccgccacacctggctaattttttgtatctttggtggagatggggtttcaccatgttggccaggctggtctcgaactcctgacttcgttatccacccacctcaacctcccaaagtgctgggattacacgcatgagccaccgttcctggccgatattttattttcttaaaaggtcattatcagatgccacaagagtatttctataaactatgacccaagtatagcctaatgttaatagcttaaaataggttttatttaccttttttgccctttaaaagcaaggaattattttttaatggaaagaacatagactttgatgatcagttcacatccttgctttaccccttgaaaaatgtgcaacctggaaagacagcttaacattcctgagtcacatttgtccaaataatacaaacaatggcaacaagacttcagcactaatgtctgatgttttttgtatgattaatctgtgccaggttccattctagtttctttacacacattataccatctaattctcacaacaactttgcatagcaggcattgtcatttccactttacaagcaggaatctgaggaccagagttaaaagtaactggtccaagattgcctagttaataaatggtggaatttgcagtcagacccaagctggtttgggccaatacacttgaccttcttatgatacgtcagccttgtgaaatagggcagatactattaataatatccaccttgtgtgatcattatgaaggttagatataatgtatgtggaactcttgccaccaaagtggttccacaagaggccctaaacaaatgagtaatcattattattttaaaatgtccgtaagtgaaaccgatatgccaagaccagtaaaaatgagagcttcttaaggaaaagagtaggaggcatacctttgtttcattttgtttgttggtttctgtgcttgctttttgttcttttctgttaggcacaggttttatttagaataaattaaatttttttttctttgatgagtgcagaaataatagttggaaacattgaatggaacagctaatgtaccatagtaatacttcttggattaccaaaaaaaaaaaaaattaaatctgtaaaatgaaaacatttttgtttactttggtcagttcaaggttcagtgttatctagagatttttgttaaactcaggatttctatatgtatgattgtctgctaaattcagaattagaagagaagagataatggcgctaactttgcatgttaaatatactgtgttactagttttccatgaagtttttactcaacaaataggttactaaaagagctgtgacctatgagtttcaccaagtctttccatttccaattcggcaacaaaagtttcacacttctcaattactcttgtgggaggaatcagaatgccaacagtcaccttgatctaagcgtattattggagaaaaattcaaggatagatatttgtttctcattagattttcctcatattttatcattggggtcactctagtacatggtactagaatttgggatttttatttcattttagattggactgattttctggtgttagtcattaaaaataattccaactctttgaagagatctgggatgtttgttattattctattgattaaataaagctattttatttaacaattgtgttgttaaactttctatatacttagaataataatactaaaaactgaatgggtatgagcttttcttattgaatttaatgtcagtattaaataccttattgaaacccatactttgaaagcttgattgagaaattggcaaaagagttgactgaagtaaaagtaatgaagcagttcactggtcatccaggttatgaaaaattaaaccattagagataaactgaactgtgaaaattatgatcatggtgttttcataaataccatctatgtctccgccaccattctaaaaaaaagtaccctatcaaatggtgaaaaataagagtgatgtttctgtgaccatttcattattcagttttcttatatttgaaatgtgggaggttgaactaaaatttgttggttcccttctttaaaaaagtatagttatatgtgatatttatttatttatataaacaaaaatatagagatcttaccttgaaaataacttttgaggtaagaatgataaagtatctaaatggaagatgaataacattgtatctgatttgtaaattatgatataaagaaaatgtataaaatatgtagaaattgtctgtataaaaaactataaacagtggtccgttgcctattaacaaagagtttcatgttatctaaaaagtcttcaattggctaaaacagcagaaaaatagaaattacatactataatatatcctaaaaacatttcaattccatagatactcttctccatgcagccaatatttatgaatttggagtaagtgacctactcttagatatttgagcttgattataattcatagtcaaagtagcctccttgtaaataaccaaaattaaccaaagatttttccttatcttccaaaagcaatgccaagtaattctatccaaattggaaaaaaaaaaagaaaaaggataaaccttattaggtgtcatcaaatggtgttgacataatgatatatatgtttaaggataatgtaatagaatatgtaattaaaattaaagtatatatgaaaagaattgattttaattgttttaaaacataagatgatttaataatatgggtcggagattctttttagttttataataaatatattgatttctgaaatttgggtatattccatagtacacttagcttatgttaatactgaggccagattgctgtcaggctaatagcgtgtagatatattatagtcacactacaatcattccgtcagttttcagtttccctttttcctgtgatgtttctttcatcttgttagattattctcaagaccttctctaaataccttcagtagtaattcacaaactctttgttagttaatagttctcaagaaaattctgagatgtggttgacagaacttagatcattggtttgtttttggattcctagccaaagttttattctttgtttcttaaaaatactcaaaaaagttttttttccttattgtaagccctctggaaatagaagcaaatcactgtttatacatttaaaatgtgatgaaaattacaaaataaagtccagtgaaatatagggcttgtatccattagtgccttaagaaaaatccctgttttctgaagtgcgagtgggcttttctggtttgtttttgttttgttaaagctccaggacctcccaattttcaagggcactttggggcatgtgtagcatttatttgatgtatggatgtagatgcatattttcccacatctgtctctgtggacctatcctttgtgaaatcctaaaccttgtattaatgcttagtttatgattcatggtgttctgagagcaattatataatttttctggggtgtttattcgatgtgcactgtaaaaaaaaatgagagttattttttggtaaccctgcacttgcctttttattggtgaatttcttttccttttactgtgacctgtgaatatcactgtaggctcactgccaattttgtgagccgctgcctgcttcaaaatggaggcaggaaggtatccattttcatcaagaggatgacagtgtttcagtctttctgaccatctggagagaggaactttgagagcaaaagaaaatggggattaaaaaaaattatatttagcagaaaaggcaagggggaaaaccaattaaagttaaactataccttatgaatttgtgcttttctactatgctgtcctgtttaaaaaaaacataaacaagaaaatacacaggctatttgtataaagaattggtttcccaagtctcatgagtattagtaaatgaatgtaagtaaattaggtttttggcacactttttaagtttattgtacacacaaatataataagcatgaaaaaggagggctccctcctcccgcttcctatgcacacactgattgttggtggtcttatgtagatccaggcttttaatggcctttttcatgcatctctgcaaaaagctgacactatgggaatttaatattctaagatatatttatcactttctgtggtttggatagttcatttgtgttctctctgtctcccccctccctacctcctctctgtaaaagtgaaaattttaattgaaaggtagagtttttactctaccatttgaaagaggtttgatgcatgtctttctgtttttaccattttcacatgcttatgggccatctgtgtttagaagaaaaagaaagaagtgcttagactcacaggattaccctatgggcattatacagtgtatttacaactagacatggtttacatcaactggaatataacacacctggttattttctgttcgcacaaatacaccgagcttttgtttcgttttgttgtgtttgttttagtgtgttcggaaagggcactgtttctagggtttgttcagatttaaactggaaagggtagaaatgtagcactttctgcctacttcttatataagaatggagcttgggctgctgtggtcaatgcaaaaagcaaaactcagttggttctttctcctcaggtctatgctccatcagcaagcactgccgactacaatagggactcgccaggctatccttcctccaaaccagcaaccagcactttccctagctccttcttcatgcaaggtaagatgctgctgcttctgagggaaaggccactggatagcattttcctgggtcacttaatgtcacagatggggcagaagaaatggaatagtaggcaagtgtagaatttttgaagtcatgctcttcttaggaattgaattccttaaaaattgatgtattaattaaaactgtactaagtctttctttacaattaaacccctttaagcagtaatgggttaagattagattgatctgcttcacttagagccgatgcttatgatggtcttccactcatgaccaaccatttcagcatcttcaccatccccaagacgatgtagctgtttgtttagaagtggttcagctccatgtatgttttgaacatcctggatttagccaactgggaacaagttggcctaatgtataaccttatgtaaaattttcacccacttactaatttgtaggtaagaacaagggtccaagatgaagtaacctaccacagactggaatattacatggtgaaagctctgtcccaacatagtaactggtttaggataaaaggcccaacttttgggggagaagacaaatataggaaattatggaattgtccagtatgtttaaatacatggatgtgtgcccccaccctgagcttgtagtcttgctactgatagcgtatacctttctgctgctcaaaaaagaccaagatgtggccgagtgcggtggctcacgcctgtaatcccaacacttgggaggccaaggcaggcaaatcacaaggtcaggatatcaagaccatcctggccaatatggtgaaaccctgtctgtactaaaaatacaaaaaattagccaggcgtggtggtgggcacctgtagtcccagctactcgggaggctgaggcagaagaatggcatgaacctgggaggcagagcttacagtgagctgagattgcaccactgcactccagcctgggcaacagagcgagactccatctcaaaataaataaataaataaataaacaaacaaataaataaatgaattttttaaaaagaccaagatgtttgaaatgatagcagctacttcaagaatgaaccacttggaggatgcccctaagggctccatcctgatatgtgtgtggcacttattttctaatgtaattatcttgttaccaagttaatgccctgaatttagatgtggaatttaccaagaacccctgtgtgcaaaatgttaactctttttgcccaggtgtgaaaaccttatttgtataagccttgtctacgggccatggggtttccttctttatgcatctctaggaagggccatgtcacaggaaggggagcacatttggggcaaagagtaccagggaagcagcctgatatagtggacacactcaaaatcattctcattaaaagatactaatcttccttcccttcagtgtgttagctcttttagtttgttagttcacgtgtgaaattccatggaaatctataaaattggatggaatggctctgttaggaatagagagaatttgttccacgcataatagagcccgtgtgtcagaagtcctttaactttgtgacccgtcctaggtgtaactcaaagggacacagcaggctatgtcacctgggtgcgttttgtgccgtgacaaaaagctaatcaccttcagttataaacagtagctacctcagcatcagtcccctgttttgtgagcagtgggagatattgtcctacaggagcttacagagattggcaactcaaggatccatcactcaaaacagatttcgattgaaaacattgacggaaggatatattttttctatctgcccaggaaagtggctttctggaagggtgcacattgcaggagaggccaggtagattatatcagtaggctcctttccctagcagaccacacaaaatatggggaacaaatttgtttatctgcatatgcatacccgaaaagcaaaaaaaaaaaaaaaaaattgagttgacatttttgatgagcacaattaatttgcacacatctaattctattctttctttcaaaagaacattatgccaagatcatgggatgtgataaatattaatttactgtgaaaagcataatttatgtaaaatatgtatttttataagtctgcatcaagcagagtactctgtgttaacagtcctaaacgcattgccacccagggtatcacattgtcaggagactcttgtttagtgatatatgttttcaatttatttgtcatatgtgccatctatttaaaatgttagtgatcttgaacttcatatttgaatttaaggtgacatttaaacctctgtaatctaaggactaaagctcaagtacatgaatgataactttaaaaaaaatcatgtgttttcacatgatggccacagaaacagttgcatcatggtcctgtcccacatcagcttcctttcagtagaggggtacttggtgccctgagaattcaagacttgaaggaatatgcaattaaggtgaaagatgttcagaaactgtctggggcatattgtaaactcactactgtggcctcttatttgtaacttcaatttccatcttctagttaaaactctgaagttgtcaaaatcacagacatgattttgcttgcatggttcttaaagagaggaatctgcaaactattcctcccaatatgaaatgagtccagttacaaaattctaacttccggatttaagaactcaatgaaaaagagcttcacgaaatacagtgtcagatttaacttttctattgcctaactttttaataggcctttactatataaaatgttatggtgaaaataatcttattttcaaggaagcaatatctgctatacatttaacagccagctgatggcctagtgtatacctagtactcaatactttttgttaaactattgaaacaaagaaaaaatgaatgaatttagcagtaatgtagatcatcttttcccttaggcttgggaaaccaaacctaaacattagcaatcattaataataacctgtaggccaataggcccagagaatgaaaaaatccgtagggatgtttttaataagaatgttaacaaaaggttaaccttatgttgaaagatactttatataattttaaacctctataattcataaatcgttttataaaatccagagactctcaaaaatatctgtaatataatagctacctagggcatgtttgtaccctttggattgctactgaaggtttaagatagctatatacctatacaccaaaaaataaaaataaaatatcctaagaactatatatttgagattcatcttctctgcatgccgtaatataattataattccaactttaattctatttattgtatatgttaaaaatgaaattaaacattttcaatctgagattttttaaaattaatacttctttacatgcttttaaaacttgtcaactttgtaatttctcaagtacttttcaccccaaagtttaggaacaatttaactttttagttggttttcatagaaaaaacagttagaagacttctaagaaatgtttcctttagcagtaattaccttgcgacttgacataattcatggtagaaatatactctgttgttcttttacagttcaatttttaccaagaacactttaacttttttaagtgtttatatttgtttgacaatatagagccacttgggaagaaatgatgactgtcttctgatgtaatcagctaaccaacacaaagatgaataacacaacaggcagtcattttcaagtatatgaaaaaaccctattctataaggcaaggctgaatgcctcagaaagtcatggttgtctttgtcctttacagatggccatcacagcagtgacccttggagctcctccagtgggatgaatcagcctggctatgcaggaatgttgggcaactcttctcatattccacagtccagcagctactgtagcctgcatccacatgaacgtttggtaaggcagacatacacggtaacgggaatgtcacagctagttgattaaacctcgtcctctgtctttccatgcatatacacaaggactctgcaaataagtgcaaaaatggcacacacccattattcttaagttgtattgtttctgtgatcaaagacataacaggttcaaatcacctttgtaaattcttccagattctctctggcattgttcttttgtttattgtgttttgctctgtgccttctttatcacaatgtcagcttccttgggtacataaatagatacctatttaagttgtagaatcttaacatggtggttcctggtttttttttttttttttttttttctatctgtagtttcaaaagatgtactgcagagggcagagtgacagtcggtagattatatgcatcacccaggagcatttcatttcccattgactggcctatgtcagctttggcctgttgtgatgtatccaaaagaaggagtttgtattttctgtagacttccatcagtaagagaaaccatgaggtttctacatagatcagattcccatttttcagtattttaactttaattcccatcccagcctgccactcatactgtgttttgcgtcactccaggtgaaaactggtgggctctagaatgttaggtctttcattactaaacatttccactctgtccatcacctacattcatctatcatagtatgtctctttatcctggaggaaacaactcagctgactttcttctagccttaaatatcaccacagcccagaatccactgttgaacttaagtctgtcattaaagagaggaaagagcctagatcttgagtgagatttgggatgcagataagatgaaacttgaatcccttgtgcaagaacatagcttaaacaatatgtggacctcacatcctacaaatgcgaaagcatatgggaaatccagtgatcccaggtgatacttacatcactactattcatcttgcatttgcccctttttcttcttctcatatctacacttaggtttctttctctgttctgataaaggaaatcattctggattcatgtggtctttgctctcttttgctcaaccagtacagataagaaacaggatctgatctcctactccaataatcaaaaaaattccagaagttaagatttctgatatccttgaaaatccgtatttagttggtcctagtggtagagatgctaagtagtcaattagcctatacattcctgagaggcagacagtggaaatggtattggcctttttgtatcacctcccaagattgaatgtgtaaatcacaaactatctcacatttcagcacatttccagtaaatagcagatgacttattttcaaattttctcttttcccacctcctatttggagatattagagtgaaagcttagagaaatatcaactatatcaactattattatgctagaatccgttttggctaaaattttcatttctgcaccatcattttccacttctgtgggaactcatggtcaaaactgtatgtgtcctatgagcaaggaaagttttgattacaaataaaagttttaggcactataccgcatgttggaatttcagttcttttaagagttgcccatttgacattaatttttcttcccttctgtgtttctttctttcttctcctatcatgctcaagagttttgagttaggcgatttgattttatcctagtccagttcactgcatgggaagtagctttaaaatgtgcttccatgcacaaaaagtataatttcaaaatggaaaccaactatattccttttagaaaaaattttacagaaccaaaacaatattatgaactagagagaaaatatcattttgaagtagtaacccagtaggctatatcagaagccatatttgcaatgccatttacctatcacgaaacacaggattttcatttttcatctgaacagttaacagatttcagagagtagagtttttgttttaaaggagacatgaataagctatcttgcaatgtatactaatgaattttcccactgttagtgaaactattgaattattatatctagttgtcattgtactttcagtatttaaccatgtgaaaatcttttactgaagtgacttagaagaatctgacactgacaatactttgaatatatagtagcagttggtgtcctttcagttgaaaataatggtagttccttataattttattcttagcatctggctagccccatactgaacaaagggatagtttaagaaaaagctaagcgctgttcctggattatttggggtataatttggccaagttgatattatctgtaaagataaaatattttaaaaacatcattgccttcatcactttatgccatgttataacagaatgtgtaattataaagcttaagatccacatatttcagtagcgactgtcaagttactgatgtttagtctttaaatcccctttacagttttagcctgtccaacagaatcccacagctaatcattactgtgttacacatacccacacaaaatcactcagatgaatggagtttgcggttaaagtttggaatgggttgttgtagatgattttatgtttggaatgacttggcagagttctttttaagaacaggatagagtcctcactgtctggcatgatttaggcatggtctttgcactacagggcgaaacagtcctaggagtctggaattttcctttaaaggaagttctgttttcttttatttttttgtaacataaacccttacttcagtaattctcaactgatggcagtttttcccttcagggaacgtttggtgatgtctggggacattttcattgttacaactaggggctagatgctactggaatccagtgcgtagaggctaggggtgctggtaaacatgacgtcatgtatgggagagcctccacagcaaagaattgtctggcacaaaagatcagtagtgctaaggttgtgaaatcctgcccaaacccaaagcatgattttattcttatttatgtgcaccagttattatatttttctaatgtttgaattatcaaccagtatatcagtaatggaaacatttccaacaattactctgttaatagacacgaaatacaggactcttgggcatcataagttaaaatgaacgaatagtgggcatgtaaagcctcgcactttgtcacactcctcatgtcctttgtagcaagcaggaaagacagtaatagctggagtaagagactaagaggacctcttatagtttatccctaaatcctctaaaagagacattattctctgtggtgtatttattacatctctgaatgacagtagttttcaagatagtttttaatgtaaaataatctagttataaatctcgttagtttatttcaacaactaattttctatgagtctctaaaaataactgatttacatggattccattggttcactcctttataatctatggggattaatttttctttttattctgtgaactcagcgttaaccctttgtcaaatcccaaattactgcccattttacataaagttaaaagggcccaaagattctcaccgatgtgattatctgttttgtttcatcttctgattattatagttagttaaatatttataattcttctcctctttttttgatttttgcacatttcaggcagatttgtagttcgtctgttcttcagaaattccacatggaataggactgtgtagaagtgaggttaaagttagtcatctctttttttgttcttttttccacattctgtttcttttcctccattttgttatagtgcttacctctatagcagaaatacctctatccctgctaagctttcagaatagctgtactatggaatgggcccactatatttttcattggagaaaattccatggactaccttgggtgttcattaggtggcaagtagaaatgagtttaacaggtggcctaaggaattttggggtcaaggaaagaaagaggtccatggaatttaaaaatttgaaaggcattctcaggaacttggaaagatttaaaggcatcatctcaacttttttacggaagtcttttaagttgggctattttggtcatacagaggtaatattttcaaaaacattcatgcgtctttgaaaatcctacctctaatacgtagattcatttccttagactagttggctctcaaataagttatacttcaatccactgtttattaaattctgactgataaccaattgttcattgagcgtatagtataattatgtgttcagtagttagccacaagttgtgggatgcagaactataagctctattcctttaaagagtttacaatacaggtgaaaatacattagaaaaagcaagaaatgaaaggccaaatataattaagtgttaaagacaatagtgcagaatgtaagtgcattagggacctagagagaagagatggtggaagagttggaggtagtcagggactcttcaagaaagaggtagaattcaagacggatctcacagagtaaacagggcaacactcaagagactatggtttcattcctcgtgagcaaatgcttgggttttaaatacccgtgactatcagcatcatattcaatctcttattttgaaataaacaatttttaacagcatttccaataatgatataataaagactcataatccattaatatattgcatatgaagaaaaagtgtattttagctttaatatattgcctttacataacacattcagatgcctatgagaataacttttgaagctgctttttatcttgaaaatagctcagcacttttttgtaaattactatgtccattttagtgagctgttcattcccaagcagatgggtggattgcaactaatttgccaccttacaggcactgtggcatacccaagaaacacagcttatttggaaaactaatataataattaaactcaaagcagagtcttaaaccaagtgattctgtaaagatgttgttctttcattgccagctatgtgaggattgcttgtaggtggggcatggaaagaaagtactcaaaccaaaataagtcatgtggtcctaatttaattcagtatagtcaatagttacatattgatgagtaagagagatatttaaccattagtgctttttaaattttttatttactaaattttattgttgctggggttcaaaaaaatttaatttgggaggaagaagatttgagactggttagtctttgccatttagtttcaagaagatcaggatgaaatgtaatataagccctgtggatcataatgttgttttattcattatatagtggaatctttttcacttgatcaataggccacacaaaaaaattaatagtagagtggtcttttatgttgccgaaaccctggagatgattttaagcagtaatctgtagatttcgagattgtgatcatttctcaatgtccctcattgccattatatccctccacagttgatgcaaacccaagctatgtttctgtataacttattatttgaaaaatgaaagctgtcagatctaaacaagatatattcttggctattttgaaattctaaaagctgtctccattgtaaaatagagagttgtgagaaaagtatttgaaaataactcactaaataccttatgattaaatatggccacctttttctgcttcttgctatagagctatccatcacactcctcagcagacatcaattccagtcttcctccgatgtccactttccatcgtagtggtacaaaccattacagcacctcttcctgtacgcctcctgccaacgggacagacagtataatgggtgagtcacagaaatgccaattctgataccaacaattggtgtcagagtttaatcatcaaggacctctttttccctttcataactgaatagcaattaggcactaaatattagtcacatgacagaatgaacacacaaatgtaccaaacagaagtaaaatcactggcttgagcataaccatatttttcgtcacaagacactgaaatttagctacgttctacgttgcaagtcattagattgaacaagggttcaaacagaccaaaactatcttgttcctcacattcaaaaagagtgaacaaagtcataagatgagccatcagtgactagtgagctacaaagcagaatagctcttaatggtagttattgaccacttcccaaaattccagtcattgtgctaggctcttatccatgatgtgccactgtcttccgaggactggttaatgtgaaattctcaggtgactgctaataactacatgaggttaatctcctggagaatgtgacactgtggagtccctcagaggggaagaagtatttgttcacttatgagagaggagatgcgtgggcatcagttggccagaaattatttgctgcttttttaaattaattaattaattaatttttaccaaggacatttactaatgagttaaggtccaagaagaatgctgttcccatgaactgagccatcatcctctcatttcttgtgatgttcactgtagtcttttccataggtggttccccagtcagtattcccactttgaggaatgaactgggctggatgtccagctgcccctggagggaagaggtggagttggtggggagatagctacctgcttctgaaccagctttgacaccttgttgttcagatgagcagcacagcttagtgccccagggtcttattaaaacctcagacttctcaggtagtcactttctgcggttatagctcaaactaactccttgcttggcctgaatgtcactgtcagagcgtcggtggggagaatactcagtgtatgtctttgagagaagatggcgcaacagaataatgctgctgttgagtcctcttagctctttgcacttgttttctttagagagtgtgtagaatttggggaagtggcgtgaatcacttatgtaggaaagtttttgatgttggaggagagatgtgttttgaaatgttggaaatataatttctgcctcaataatgccctccctgcgtattcaataatatatctcacacttgagatgagctatctcgcagcctctccactccgctatcctgtctaagaagcaaattgaggagagagtttccattttttttaacttttcctaaccaagcttctacaaatatgttgcatcagtttgaccttggagagctacagacagaggtcacatggggaagtttgttagctatcaatgcagttttggcagatttgaaaaacaagaagaaagaaagcagtgcagaactgaaagagtgagaaaagcatatttcacttcagtgtggtttgacaaatggaaagcccctttctgcagtcatgaggtctggttataaagaaggatgaccggtcattcatccttttacaagacagatttcctgtctacttgtggtttgagtaattttcttttttaggaaggtatgaaggtggagcagaaccttgagttgaggaaaacatacttaggctctgtttgaaaaaaaactttttctgattgatttgcaaaacagtcctcttgagagagaggcactatgacttggaagggacatatcaggaaatagggtggttatctccatgagctgtagacagcttagccacagctctcagtgggaatgagttttgcttggttttagctggtcatcttcattagtttgtggatgaacaggagaatctacttgttggtctagccagagtggagcaataggtgacttctatatgctgagaatagacttaacttgttaaaaaccatagggccttatttaagggtcttgacaataataaaggagctataatttaaaaacaaaagtatgagatttttagaacccagaaaagggctttttagaaatttatttcatacattattttacaataatggatgcacttgtcaaaatccactagcggaatgagaaaaagatgcataatctttaaggaaataggtagacatggtaattcagcattttggaggagcaaacctttattattatgcatagatacagatattactttaaggttactttaagggagaacattctagaatgtttttctttaaaataatatgttcaccaattgcgtacgtgaaaatgcagaggaaaatttaagcataataagccttagtattgcgtgatgtctgagtggcccatgttttttcacacttaagttctcttaggctttggtttgattttttgagtgtggtagaagtcagtgatggcagcgtgtctgtataacaagaagagaagctttctcttctgatgttagtgatactaccctaacaaacagtatggattaataggatacatctgcagacttttgaaaatatttggcatatactcactcattctgaaacgcaggaagtaaagaaatattacgttgcctgtatctcaaagaacaaacagagctaattaaataattggcaaatagggaacacatagcctgacacatgtttgagattacacacgattctgtagaaaatgactgtaagcaatactaatgccttaagaatggggttcgagcactaacacatggacatcacatttttcacgttttcctggtaaaaagttgcaagacagtgcagtcttttcatacatggtgttgatgtcttaggaagctgctttttcagttcagaagagggctgctgcccttcgtctcagtgtcatgttataatatgtctttctggtggtcagcagttgtcctgaactgacactagaacaacgcagtgcatgtggggtgagatacaagctctagaactctcggaagggaacctctctgtaaccacattccctttcttcttctgttctctgcatctcaaaggtggaagatgcccactgaggtttgctgtttgtttggcttgggggagtgaccaggtgtttcttgttttgttttcttttgccctataatacccaatatcattttttgagaaatccataagaaggataaagcttacttggattacattaatgagagattttttttttttcatgacacattcatccatggattttcaagagaattgtagaacaaggtattttactcattgcatacagtccactacttttctcaagccttgctggcaaactctggagatcatattagacctttctgaattgaaaaggtcatctaattagccctccaattagaggaatataatgtatgggacacagcatggattcacagtagttcagctggtggcgcacccagttaaggaaagaagctgtcaggggtctttgggagttaccagcatcagcaccttctactcagttcttcaaactttttcaatgttatgccactgggtattctcagaagcagtgcagttcagtgcctctgcatctgagcatacatacggaggaggaagtgtagtaagttattagataccagctatagagaataggaatgtctgcaggatattaaccatacacatttggttagccacatacttccttcctatttgcaataatatccagtagcccttcctgatggaaagaagtaagaggacctcctaccatagcacagaccactgagactgctcaagggtgagaatgcgtcgtctccccattgggacataccatctgtatacattcacagggtgtgaccctttgtggtttgaggctacacacactcccttgccctcagagagaactggtcatataactaacataatggttataataactattattgttttattagtctttaactggcctgcattctaatacgtggtcttttccacgtttttaaacctcaaaccaaacagggttgaaggaacagactaccaagattgatttaatacaccatatgctaaagattaccctggaatatctatctggttcatgaattaatctggcttagaactttaacttcgaatgacatgttagtatgtggcttgtctagtagaaacattatgtccttttctctttgaggacttggtttcacagtaattttattattagagtagtcacataatgttcactttatattttacaagaatattgagccttgaagtagtcaggcgatgaacaagcacagagcataagagtaataagaattgtatccagcaatgtgaaggcatcttagttaccaagaccaccagcagagaacaataaactagtttgatttaaatctcctccatttcctgtgcacgatcaggaagcccaacttccccctgaattcctaggaatccctcctgttaaaaaatagtgcattgtagtctatatacttgcgtttgtattttaaaatggttgtagtaggagtgctggaaatgttccttctttttgtcatctttatagataagcacatggcattgttatgctgtttctaatggtttaataacacgagggtcactcggacacagtttagaaaaacctactttgaaagcagtcatcttctctcaggcaaacacagtgtgaattgtgctgcttattcttttgatgccttcatgatgttcccagccttagatgatgggtgtgcattaaaggggcaacacattttccaaattctgatttttagtagttgatcccaaggcaccactcatcccagtgttttgttgagggtgtgttctaatgggaatgaacatttccccaaagctgaggctgagacagagggtggtctagcatgtaacccaagatacaaaacctttctttctgcttcatcttctagccagcaacaccacctgtgttcaagccatctgaacaatacttgggtggcaggcagtgtcgaagcctcctacaaaaattacagttcctcttaataactgctcatcttccattcatatttgtatgttacagctctacttagggactgattatatttctcttgggcaagataaattgattagagccaaaattagaaatcgataaagtctttaccaagcaaatgcattagttttcatctttctgttacatggacattttgatcatctctaatatgaattgacaaaaatcttgggcctcaaagagtaatcaagtcctgttacatcaaacccacattttcagctttaatgtatcttgctaaacatggcccacttctcaatgcaaaaaaaaaaaaaaaattctgccacttgagaattaaaatatatttcttttccagttataccctttgttatatctgtcacacaaataaaaagagaaatctgtaagagaaagactcatgtagcttaacatgttcaggcaatctagaaaatgtagcttctccagtgtttcctggaccagaacaaaaggcattccaagtgaaagggcaaactggccccagtaaactgctttgaaatttaagcccttgggtttggcactccagctgttgcaaggtaaaatcgcttcatgttaaaaaatagtctgttcttatcagtggtttccatgggtagcctttgtagttttctgaaatattttcatgacgcgatgaggtaagaagttgattctatttttaattctatttcctgagtcataatatctccctgcataaaacaggcactgatagaatgtttagttagaaaggtgtagttctaaagaaatcagattggtcataatatcttgcctcttctaacgtgtgatttttggggcgtatatatttagtttttaaatgctcctaaaatatttgtattggttttcaatactttgtttagtttcataaaaatatatatattatttgtaatcttcattttaaagttgtttaaaggaagaattaatcttttgaaagccactactgtagcagatattatctgtagtgaagcaatatcttgttcttttttggcttaggttctttgttagataatgtgatttttccaatgtagctctgaactttttgtgaaaatctatattcaaatcaagcagatatcacagattattttgactgatagatctaatttttaggtatataataatgaaaagaaatatcgcttctaggaaaaaaaaaaagataagtacccccaaataccatggtaatacatactgaaaaaaggttagtatcatctatatttcacatcattattattttctctttagaatggtttttaggtttgtttgttgttcttgttgtttgaggcagagttttgatcctgttgcccaggctagagtgcaatggcgcaatctcaatctcggctcactgcaacctccgcctcccaggttcaagcgattctcctgccttagccaggcatagtggtgcatgcctgcaatccatgtttttagtttttaaaggactccttaatgcagaaattcttctcattttcacactagatataatttgttgtattttatcttatattaaatatttttaatactcttgatatctgagctgctcccagtggtccaattgtatgatgtcagaccctcatttcaaagaacttgcttatacaatacctatcatgagtactaatgactcatgtattttaatatcataactttgtgatatggaagtttattttgtcacgagataattgtgttcttcttatcatgtgccagatttctttcagtattttagcaattaacaaataaatatgggtgtgggttttgtaaaccaaataaagtatatatcaaaacattatcggctgggcaccgtgactcagtcctgtaatcccagcactttgggaggccaaggtgggtggttcatgaagtcaggagttcgagaccagcctgaccaacatggtgaaaccctgtctctactaaaaatacgaaaattacttggcgtggtggcgtgtgcctgtaatcctagctactcaggaggctgaggcaggagaattgcttgaacccggaaggcagaggttgcagtgagccgagattgtgccactgcactccagcctgggcaacagaacaagactccatctcaaaacaaaaaagaaaactcatctgacaaactcaacatataaatatatgaaaataacaagcataaattagctatgctaagcagaggtcaggagaattaaattatgacctggaaaagccatagaattggaccactgaagatccgaccccactactgcattttacaagtgtggaaggtgatgacaacacatttgtaagaaagaaggctctcttagttcaagaatggggctggaaagtctttgaaattatatacctgtttaatgaagttttgcttggattcattgggtgatttaacctttccttttcttatttcacaaaatagtgaaaaacaatcttccctcagaactttaataggttttatttagatactatgtctatttgctaatgttgaggctttagtaaatacaacataccccaagtgctaggcattctgttaatactgaagaccacaagaatcctggaaatcccattttatcacttagttctaaaggcaagataccttccaatgatacatgttaaagaaagctggctttgaattgtatactgtaatatatgtcttttattattcacaatactctttgttcttctcttttgtagataaaaataccagtgtttaaggcagtagagataagcttcatgaatatgtagacttactttatctctggaattcgaggccatattgacttttagtagcataccagttcactttttttagtgtgaacacagacttttaaatatgtggagaatatatgttatttaaaacattaaaaatattttctctccttgttagccagacctgttgtggaaatttttgtttgtttgtttggtgtactgtaggactgtgagacgaataccccgttttgctatgtatcaaatttctatttatttgaaaacagatggaagttatttgtgaagataattccatttactataaaataatataaagaaaagccagactctgaggactccagagacctgaaagtagtctatacttgtcagcaatgaccgtcacatagcttgctacattcaccagctcatcaacagcaaggggaaagtcatagcaaggaaaccactttatctttaaaccaaggtgtcaggtttatattttatctgtaaaaaagtaacatgaatatatttgacatctacctcagcaaacaaattaatgctaattaaagattaatgtgttgtaattagcattaaaaatgcaattaaattgtgagtaaatggaccaggaatagaaaattgttagacgtctcactgcctggttttcatattctgccttttgtttttgcagcaaatagaggaagcggggcagccggcagctcccagactggagatgctctggggaaagcacttgcttcggtgaggaaatattgactttggactccatatgtaccattgtaaagggtgaactttaatcagaagtggacatttggaattttagaaaatgaatggcaaatagctttgatttttggaaaatgctagctttcttgcataacagtcactggaaaatttgagaaggctctgaagcttccagtatatagtctctttctctcatcctcaaaatggtactaagctgcactcaattatggatgtgggaatattctcctggtctttgggtttataggttttttatactgatgtcttatttttctctaaagtaatatgggtgcacattgaccagctaagactgtcttagcaaggaatagttctaaaacactttgaaagaggcatttgaaaaaaaaaaaaaaaaaaaaagacaataactgaggtccatgaagaactgtcacataattggcacctgggggactcagcttctctgctttgcccacctactgccagaaagctaaaattgaacatttcttgcatgttccctgatgacaaaatggcataccttcattgtctcagagagtatatctggtattttagtcaaaagctaaacatggtcatttagaaatgtaagtggagggccaggtagtgtggctcacactggtaatctcagcactttgggaggccgaggtgggaggatcacttgaggtcaggagttcaagactagcctggccaacacggtgaagccctgtcactactaaaaacatgaaaattaactaggcatgggtggcacatgcctgtaatcccagctactccggagactgaggcaggagaatcgcttgaacctgggaggtagaggttgcagtgagctgagatcatgccactgcactccaacttgggtgacagagcaagactccatcaaataaataaataaatgtaagtggagatttctttctctaagattttgtctcttcagttggcttttaccattgagagcattaaaaaagttcacactgtattagcattgtgccctaagtaaaagtttttgtttcatctgggccttctgatgctatgcaatcaaacgcctagatctggcaaaagagtggcaaaatatcttaggaatgatcctgttcaacctctcattgtgtagatgaggaaaggaaagttcaaagtatctgcttggcttgcccatagccacacagccagtaggaacgaagagttggtttgaagtctgctgaccccagcctggctcttttcccaccatcccataccacatcagtaattcttgttttgaaaaattaaaataattgttaagttcttcatttgacaattttggtactgtagttgattattacatgtatgctgtaacttgtaagttctaaatgaattgcgttgacaacttcgtagtttagaaaagtgtgaattattttaatgaatgagggtgttttttttttctccttattgttttaagatctattctccagatcacactaacaacagcttttcatcaaacccttcaactcctgttggctctcctccatctctctcaggtagtgtatttcaaatcccatttcatcatataacagtttataagaatgattccccccttgtacttcctgattttgtaggtggaaactcacttccccccaaatcccaaagctttaacattcctataacagacaaatacaaagggtgggagagacaaattaccagataacagtatagtcgtttacatccaaaccttttcttaaaaattagattatctttttaaaatatacaggcatatggaaaatgtatttcttacacttttcttagctctgcagaagacacccaacggcagaataatgtattccaataaaacgtctcagatgaaaaaaactcagttaatatagtcatgaatatgaatatagactagatagtcatcaaatatagactatttaaatggatcatttcctgcaggaatttcaggctttccaaattccctctttaaagtacatgccattgggatgtttagagaaaactataattttgtaaataaattgtgaaataattgtgtggggtagaagggatgtttgacttcaaagtataatacattcgtatgacctgtggcttcaaattgaataactataatttgtagaattatgtcagtaaataatttcacttttcaggggtccgtttaagagactcattgtctttccaatataaatgcttccagaaagccttccttggttcatgtctctgctctttggtaaggagacaggtggcttattaaaaaaacaaaacaacagcaacaaaacctaaatcacatctgtacctgatggaaaccttaccttactgtaatttatagtggagttacttgcgtttgttatttcctgcatgcagctctcatggcccagtgtaaactcagctccttggtcgaggacaggaggtttcacattgccacaaaactttcagaaatgatggccatggcttagctgggatttaatgtcaacctcttccaagcctccgtggtatgagaagatcacagaatagagagggcagtgggattctgaagtctctatgtccagagagaccgcgttgaaactgggaagcgattgaggtgattttaagaggataatcaaacgttccccctggtggaaatagaaactagagttcagtattgttgtactcctcgggttctgtaccagattcttacactctgaaaaatgatttcaattgtcagtaaccccctttcgagacaacaagagatacaacaagggatagaggaatctgagcaggtggaactccagtttccacatttcaaacaaagtagctttcattttattcattttctaatttagaaaaagaaatgttctatggtatcataatgtttgagaacgactaatgtagtctgataccctgattttacagatgagaatactgagtcccaaaaagggagttgagttgttgagtttattaccagtggtaatagcagagcttggacaaaaatctggtgctcacagttctgccatccatttctagattaatggtgggaaagaaaaattaggatgcacagtcattctagaaaacatcacaaattccctcgacctgagtagcatgatctcagtgaaaggcacagaaacaaggctagagatgccactttttgggtcttggtaatgcatcatggaagaccacatgttaggaagaaagaacttttatgaagatgcaaatatggggacagattgctattttcacaccgacggctctgtccaaattctgtcaagaaaagtaattgaacaaaatattctatttttatttagcataaaaatatacatgcacacccagaaaagacaggaagagtggattttaaaagtgctaacagtgtcggggcatgagatttcagtgagatcatagctattattttttccttttttgaattatgtattttccaagttttctacactgaatgtgtattattttacatttaaagtgttttttattttgtaggttagacatgtaatatgtattctaacagcaatctttttttaccttcaagtttaatgaatcataaaaaaattattttcttcagaagaaacttttagtcattgctgtatattgactttaaatttctggcttagtggatcactgataactaatcttattcccttaaaaagtttttcaagatttatctttttctaaagattgttttaaaaacaagtggcaaagctgttttccactggtgcgagaattttggtttaacataaactagccttgcatgaaggtctaacaaaatcccatttttgtacccttaaaagtaccttgattccatggtgatagtttttcttccacaggaacccttcttaccaaaattcagaatcaattaaatgttctcttttaggagacagccagcctgggggaattgtgagtctatgtaaagtctacatattttacatttaaaatgttttccttgtcccaaaattcttatatgggaagtttacatgtatttacgttgttgtttaaatgaaaatcatcattgccattgccatttccaaaaggactgtttaaaatattggcaagcgtctttttacatgtgtctagatctgattgtaattcccactttaatatcagcaggcacagctgtttggtctagaaatggaggacaggcctcatcgtctcctaattatgaaggacccttacactctttggtatgtctcatttgctaatctctgtcccacccattttcaggtcatgttctttcttgttcagtctcctttactctccaagattttgattttccctgttagtaactttaagtcagcattaagcacacaggtttgcgggagccagagtcattagcctatgcttgctcctatttggagatgggaacccagatactactgtaatggcagccccagggctctaaatatctagtagcagataaaatcctggaagggcaatggccttctccccatctctaggaaagatccctgtcaatgattaaatcactttcctgctatcagagtgctggaactccagccaggtcctatacctggaacatttgattccctctacctctgctttactttccagaataacaggtttacaggagctttccttctcgtagaaacccagtggtatccttcgtggtagagaaatgcctactcttccaggagtgaattgctgaaaatttccatggatgtagttaattattataaatactcacatgatgattcagtgtctgacacttcagtctttctctcctcatgatggtgggggccagaaatatgcaggaaacaatgctggttgtgcagcatttaggctgtacatgaatttagcgggaaggaatagcagtaagggagaggagccttttagttcctcggggttgaggttttcttttctccctcctatcttgagatgacacatggaagaagacatagatttatctatctgctttagtgttgtcttatattcttccctttcagcttaatcttaaggaaaatctgaaaagaaaagcaaaggtggatttccctcctttgctgtgttcttccttgctatagtgtatgaatcattcagctatgcattttaaccagtaaaggaaaccagacagtgaaacatatatgcactacccagcccaattaatctgcggaccacatccacataattagttgttttagtgtttaccttcatcagttattctctggggcctattcatcaaaaccaggcttcgtccaactatagaactgtaaagacggggtgtatagttatgggccacagcttccattctgtttgaattctgaacactgaagaagagatttacaagcagaaactgctgtctctaccaggaagctgtgagccagaaactgtgataggcacatgtatgatttcttttcctgcatacatttacactcagaagtaagtatgtattatcattcccatatttataaattagaaagcatgcactccaagaggtttagtaacttttccaaggccaaatacgtagcaaagctagcagtctaggggaggtagtttaactcccaaacccaccaaatcagaatgttctgtaccatagactactatattagacacacattcttcctgtcagtataaaatagaaatgttttttctcatgcaatagagctggtacacttgtttgcacagccgattcaaaatcaaagtcaattgtagcatgatctagtgcaaagagtcactagatttaaaataaaaagacctagattccaactctgactttaccatttcctagcagtgtgacactacgtaactaattcactttgtgtctttgagcctcattttcatgtctgtacggaaggaatcataatgtcttccctgcctgcccatacacacgtgaaacaaggatcaatgagatggtatattttaaagtgtacactggagagtggtatttgatatcattattgatcagtttttaaaatgaatacatacctttaaaatgaatacatacattttcttcactaaaaactatacgcattgtctagttgtgaaaaactagaatcctaatggcaaggatgaacaaaggttggttggtttttaatggtttaaagttgcgaattctatgctatagttggggctttgaactcagttagatgcccccagtgaacagttgattcaagtgtttgtgattcttcagtcttaaaatcttatactactttagttgacagaatttatataatttttttctgtaaccattttgaggcccttacacgcataccaccacacacccactggttttgatgacaggaagccagaaacaccggtaaaaactcaacaagaaattatcatccatttgcttttccctgtctctgatttggtacttagcactgggtcatataccacagggaagaccaaagaaatataccttcaggaaaagaatttaattaagaaactataaataggtcatctttccagtggtaattgtttaaaactctttaacttaatacctgccagaaagttccttaaattcagtgaatgtttttctcttctaaaataaatttaaattgcctttcaaaaggcagtaccgtatatagcacatgtatgttataatgtcctggaataattattgaatttagtttgttcatgaaaaataacactataattttaacattaacacgttctaccagttttctggaaacaacactatttgtattattgttttaaggaaatacattttattggaaacatgtatttagaaacacagtgtgttttttgtcgactaaaattttacttgtataatttaggcaccccttttgaactaaatcaaattttacatcatttgttaaccaacagcaaagccgaattgaagatcgtttagaaagactggatgatgctattcatgttctccggaaccatgcagtgggcccatccacagctatgcctggtggtcatggggacatgcatggaatcattggaccttctcataatggagccatgggtggtctgggctcagggtatggaaccggccttctttcagccaacagacattcactcatggtaagtgatgaaatttatagactctatagttatcatatagagttagaatttcagatatagatactattgttgctgttttttaaaaaatcagctttattgagatataattcacttaacatacgatgagcccatttcaggtgtacaattcaagtgttttagtgtatttacaaggttgtgcaaccatcaccatagtctaggttttgaatatttttgccccctgcaaaaagaaaagaatccccgttgcccattaagcagtcattccccatccctccacttccagcccttggcaaccacttgtctacttcctatgtctatagatttacctattctggatattttgaatatatggaatcatacaacatgtggtggtcttttttgactggcatcttttacttagcatgactgttgcagtttttctacagtttgccacgtattagagctttattcatttttattgtcaaatagtatttcactgtatggacataccacattacacagttgggttgttccaactccttggctatgatgaataatgcttctataaatattcatgtttaagtttttgtgcagacacatgtttcccttgaggatgaattgctgggtcattgttggtgtttgaaattattcattttggtgaccctggccaaagtgtacaatttgagttcatattataatatgacattgctagtaattcaaatattagtgttttttttttaattaaagaagccaaaatagtgtctgtcaattctgagtctgggagatagaaatatatggtatgtttatttgtataaatacattgcatgtgactgtgtaatttaatagagtagctttactactacctatttagaataagtctttatttgaattatatttaagcagatttgtccatattacaattgtgatttttttcctcattacttttgaaaggattttggagataattctttttgaggatgattatgaagattcagagactcttcttaatagaatattaagtgatgacaattaatgaggtgaccagagtggtggagaatgtaacttgaccagtgattctctgtagttctgatcctcacaagctctacctcgtctctaagcaccttagtgtcctattttgccccttacaggctcgctaaaagttgcttggatgaaggtatattttccattatcactgtagcatttctcgtttaagcatggtcccaaaaggaaatgcaaaatacatacaaattattatgaggttcttttaagttcttgctcagtagtattctcctgtccatctttcagtttctcttaataaaagtctaagattaagagtaccattctgaacggtgtagtattgaaatctgcaaccaatttgaaaccaaaaatactggtttataaatagaagcaacgaactcacatctaaaatgtggaaagatatttttgaatgccaaagagaaatctttttttctttcccttgacctctgccctaaaaattcatcattgaataaaaattgtttatatgttcatggcagttgcttagagtttacaaaagaaaagtctagattttaatttagcttggcctcaggtaatgtgttaaatacacttgggatgcatataatatgagattttcgtttgtacagctcttttttttctaactacaatgtttaaacatactgcttttaattaagaaatctggctttattaaaagccagatctgtgacttataaccatttctgtatatctgctctcaatcaacagaaaaatagtttaatttctgtagctgtgttcattttgcatatgttaaacggatgtaacatgcacccagggcattgcttcagagactattttttccataaatatgtaaagtttttcttaaataccatatgtaggttaagtggttcttttaaatattaaactatacataaatacttttggggactatttgacctttgaattgactcctttttgagtcagattcagaggtgggatgggaggaaaagactagaattatttttggagatgggaagttggactgacctcagtagaaccgaaagtgagacgactgaatagaacggtagaaaaaaggaaataattagccaatattacatagaaacccctttaatttgatcttgatatacacacacacacacacacacacaaaagcaataaagccgccagttttgctgataaggataagttcctgttttctcctctgaagacatttaatattcaatcaaggacagccacagagccaagcagatcatagcgtaactccaaagatatggcatgtcatcaccctgctgccctttgaaccaaatggggttttgcagtctctctcctttcttcctgaaaaccattcaacgtgtccccagaatctgagctcctcagcctgaaacactaatgtgtgtgaaaaggattggtttggcctatctttcccgtgcaaactggtatgaattttaaaacaaaaacataagaacaaaggaaatagtttttgaatttaatcagtctgaagttagcctttgaccatttgatacattccacaataaaaaggaagtttaaggggaaggcaaaaaaaaaaaaaaaaaaacctcatcccccttccccacaacaacaaaaaaattcaaggaggatactggtaatgttttccacatttgaattttaatacatgaaacaggctataaaactttggccagctgcagtaaataaagtagccgtgggaggtatgcaccggaaacttcagcagagagcactggtgagagtctcattcccaactacacaccttcgtttgttgttctgggcggaagcgagttgcagtaacttgatactcatcccagtcccggttttgtattgagcacatcgcctttctaactctcctcagtaattccttctgattaaagagtagacagctctgaatcctctcgacctccgtacgcttctcatttcctttctccctgccttccaaaaatcaaaacaaaatggcttgataacttggaaggtgatataagcatttctttctgcagcagcttgaagttgtggtggggaaaactgtggttctgcctcggctgttatgttatctcatttaattgctaacatattgtccttagcttttgattcataaaatgttttccttggagttctgaagtaggtcttcagtgatttactaagtattagtataatgaaagggatttttttttttcacagcggcatggctcataacacaagagcgaatgtttgtatacttgcaagctctctggatgatattattgagctatgcttatttcctgctcaaaaaccttccctgcctttccattttctacaagataaagaccaattccttagctcagcatttgaagcctattaccatttaccgaaagccttatgttgagctcttccaatctgcaacaagtcttccagcaagacaaggctgggcatattaccagaattcaccctgtatgttctccttcggaacttttgtatctctttgtcttgtccagccctatctgcttatctctgtacacctaatacccacccattctcaaagcactgactcaaatcattcttcttccaggaagccttcccttgctaccccactcatgctagccatttttttctctattcttacagccctatgaatcataccatttctagatatttatcttaaccagctccgcatagctgtgcatcttttatagatatgactctgccttaccaactgttgtaaattcctcgagtctcacatattatattttgtctctctccccccgacccctgtaaatagatcatccatagaaacgggagaaaagaaacgaggaaacttaacattctgtgagtgtgagttggcagcccctctgctaggcgctctgcatgtgttgtcttaggcagtcttcacaacagcccagtgaggatgataatagtggtcatttcaggtgtcggtaaagtgagccttagaagtttgagcagttagtctcaagtcctgcagcgggatttaaactcaagcacatcaactccaaattcaatgctcttttttactaccaggcatactctccagagattatctatgagaacaccttttcagaacttattttaaatgctaggagcttgtgattttcaaaacttgataagtgttggttggcaaaagaagtttccaggtattccatggctgggttcccagagcagctctcttcccaaatgtatagacagagaactttccctccaaagtggtggcatgcttggattaaaacccacattatctatgcacttattcttaaaccaacatgtttgcgctgagtgcctaagaggtgtgaactctccctaccagggtccttgaggtagcaaattttaagttatcaagttatttttcttactataaccacccacttttcttccaaaattaaagcagaaatctctgaatgtgggagaataaggaaatagccaggtcttcactaccctagttagaaactcttaccaagtatgattccctctctgcctcagagacctccatgattaatcctgatattaaatgattagatttcttataaattatggaaagggcaattttccagatagaattctctctgttactcattcagtattcacatccacagatgaggcctgaaaagaagcgtttcaaatgacctaaccgcttttttaactgactaagaacaaaacccacatcaaacttgtctttatgtgactctatgtgttcccgtttatttgttggtagagtcagcaactacgtgatcattgagctaaaaatcccctctactattcatatatcgcattagtgtagctctcagatccttcttgtttaaagtctatttattcatttcaataacatttatccgtggttaccaagtgtaggttctgtgctctcaaggaattcacaggctagtaggaaaagatgtgtacttaagcagattgctccctgccagtctgctatgccctctaaaagaccaggggcctgacccttatccagtagtgaaagatcacatggttgtttagtagaggagtggtcatctccagttgacttagggatgggggagtcatgtgcaactcaccccacacacctgtcctccacagcatcccttcagagtcctgcaggtgggggatgtggaacccatttcagaaatcaccaataaaagtggatctttgcccagttttcctcttttcagtaacaatttttgttttactttggattaaatgcagtctatcaaaagagcattccttaggaaaagtggtatctttttatttaactgacattatatacatgagaacttttacctcttagggcttcataggacaaacaacttcagttagttttccttgtatagttaagagctcagaccactgaattttagattctaaaagtaccctggaaatcagcccattgcccttctttgaagactaaggcctaggaaggggaagtgaccaaaccatgggtactcactagtagaattagaaaccagacaaaagaggctggacacggtggctcacccctgtaatcccagcaatttaggaggccgaggcgggtggatcactcgaggtcaggagttcgaggccagcctggccaacatggtgaaaccctgtctctaccaaaaatacaaaaattagccgggcatggtggtgcacacctgtaatcccagctactcaggaggctgaggcaggagaattgcttgaactctggaggcacaggttgcagtgagccaagattgtgccactgcactccagcctgggtgacagagagaccctgccacacacacaaaaaaggaaaccagacaaaacagcaagcagaccagcactccttgtgctatatcctacactgctcagccgacttcctctttaccctaataccataaccatttcaaaactgtgagtggtagaaattagaaaccattctgttactctgacttaactaatgaaatccaagaaaactctgtagttggccctaggctgcctgcaatgagttgctatttagctctaccagtaatatttggcaaaaagagagggtagtgggcattgatgtgatgtggcagttattggtacatagtcatgggagcagcaggagtcagaagattctgtttctatgtgggcctcttcaacaaagatatgatcaacagaggcatcagcatcttcagttgataaagttgataaaatagaaaactattttctaaatagcctgttacagaatttcagcgaagctattggtggtcagcatcatcttttaatagctactatcttgtttttctttaaattaggatatttgccttctctagtgttctgtcatctctcctaatctccacaactatcaggtatttcggagagcagattagtaacctcaactgaaagttttgatctttatcaatttatcagttgctcctcttgggctttcacaggttttgattccataaagttctgtgtctatttgagtgcatacttcatttctaagcagttattcccatggactctcagggaatttaagagattatctctactgaaatctccctacagatttcctgccaagcagtcaacaagtcttgatcagcctccttccttcaagggtgactagctccaaatgcccacaaagtccattttcatcaaatatttgaaagttcttcctaggtccagcccaaatttgcttttttctacagtccttatgtttctgcccaatagaattgcccacaaatcaagtccaacaagcacttgagaaactcagttatttgaagacagtctgctgagtgttttttccctctagacgaaacatcactatcttcaaatatttaacctgaaaaaaagtttggactccctgtcatgaactccattgcttcccagtgcattctccctagtttagcaaggatgcctttttctccacaagaaccttttagtgtgtggaaccgcaaactgaacacagtgcttaagaaaggatcaagtggactagggtggatctatctcctcccccattcagtaccttgtatcttcattaaggccacctaacaatatcctgttttgctatgtttgatgctttcattgtcctgctgacatatattcaatttgtaatcaactgaaatccataagccacctatctccccagtctcattgtgtactttttgttgtgtctgtacaaaacttcatgaaaccccattgaatgttatgttgtagcctcagtctgattcctgtttaatggtttccctgaagccctcattcagtcacatactctgccatctctgttgctggcaaatgtgatgggtgtgactaatgcccacatcaaagccaccaatacaatattttcaggggaggggattgaccagaaggccatgaggctcagtgttacagacattctttctacacgagtgctgtcttctatcctttgagtttaatctcagctggttctgtctccctccttatacaccgtatggcccacctttgctcattttgtccgtagcgttgtcacagaagccgggcatgcagcactcactgtgaagcaggaaatgaggcttgtccagaatgccttgctctggtggaaccaaactgagtttgagaggccattcctgtgtttcagagcactttcaaaactattttctaaataccctgttacagaatttcacccaagctattggtggtcaacatcatctttcaatagctactatcttgtttttctttaaattaggatatttgccttctctagtgttctgtcatctctcctaatctccacaactatcaagtatttcggagagcagattagcaacctcaaccgaaagttttgaactttatcaatatcatactttatttttttaaaactgaaaaaaaaaaggacagaaaggtaaaagaacttgaagaaattcttttagccatggatgagtgataacagctgagaatccttgagcttaccatttgatatttctatattaatttaaagaaaagtcaaaagattttgaaaacagcaatagaagtaagatcctttaagctctattcagcagcccctaagaaaagtgatgaggacactgtgcatgcccatatgtgaacatggttggccaccttaggtatttccccttctctccacatgaatacatattttactcaaattcagactctatgatgttgaaacagtctggcattggatgtttacctcaaaaccctgctctctctgcacctaggacaaacaaatcctagttctctggtgtttagcatcttggagccatgaattttaaataaatcaaagacaaaaaccttgtctttcccagttttaaaatataaaagatacacacacacacacacacacacacacacacgtgtatttaaaatagaccctataacctcatcatattcttacatccttacatggttttcttcttaaattgtggaggaaaaggcaggcagacacatttaatagcacagtgatcatcattttttaaatgaactgttacagggacataatcttaaactatccataatttggaataggcacaactgtgcatttaaaaaaatgcaatattacccttattttctcaggaaagcagattttctggagggaaaagtatatattgtatatattagaaaatatacatatgttcattcactctttctgcatctgctgtgcttcagatgcttttggggatgcataaacgtgtaaaagaaagtatctgatcttacaggccttttatcctggtagagtgataatacaaatatgggtctaactataatgcaaggtagaattatgaaatgacctaaggagcaattcagaccgctaggaaaagcttcccggagaagatgccattgagctcatattcgagtccacatagaatttcaacaattagagacaggatagaaaaggcgtttcagagccatataataaacatgatttaaaaccaaaaacagaaaataaaggctcatgcacctaaatggaagtaagaaaactgcctgatgataccagtccttgcagcttgccagccagggctgcattgggtgaaaagcccctccacagcacggcagctccagcagttggctcgaatatttcacatgagagtccacaggaagagcgagctttcatgtatattttttacatccaaattaagttaactcatggaattttccacccttaggaattaaagtagcaactcatgaagtaattcagttatgtcattcataccaaaacagaaaatactggagcaacttggcactgtttaaaagccaagattaggccttggccattttatattttttcacattccatggccgttgtgttattttaacttttattatggctgtaaatttttcaaatcaaaagtatcttaattgcttagaaaacagaagttgaaaatgggttcatagtaagaagagggtttaggcaaagcagctttaggagtgagaactgaaaaaaagctgtagcattacattttctgtaatgcgagggttctacctatttggttgacattcacagttgtgcataattatagcttcctctatatccataaatcatcttagaactataaagttgagtttaaccaaaagatctgtccaatattagtgaaatgacatctttagggaagcattgtcctgatacaatagccacattcattttaaagcagttaattggacacattgtcaaaaaccacggtattgagtttccacattttaatttcacatttgccttctccctggcttctgcacacggacgggtctcttttggagctgaaagtgtgtgaaagttattggagaatggtagtctctgggtaatgtttctgtaagctgcccaaaattttccccctgtagtctagatgggaaacagctggtatttgtttaaaaagctgttttgcaaaatgtctaaaccttgagatatagaactgaggtcaccattaaagcaggtgcttaagagcaagtgagaaagacttcagaggccgactggctctggaatcttctgcagggcacttcctattagaagaaaaagtgttgaagtttgctcctttatttaggacacggctataagtattaataagtaagtgcactagcaatactactagaaattgagtatttttgaacatagccagccctcaagtgaataattagctcagtatgaaaggaactaaaatggtcatttttctcacagggcttcaagatacaagagcccaaggcgctctagtctcctttgggtgtttgaatttcctctttaaacacaccaacagtaaaagaactactatttcaaataagcagtaccataactgactatatcttccaaggttttggatgcaatctaagggaaagggggaaaagagacccgacttggcaagacccgtaccgaagcagtctggaaaaaaagcaaagcaaaaaacatgtggaaccactaaaggccagtgcacgtcaggtatccaccagtctgaagatgaaaggaagtaagcctcctcccctgggagctggaggttattagcagctgtttatccagtcgggaatagagattaacattgtactttttttttaagaactagaagaaaatttgtttgggaagttggcttttcatatcaagtcactgtgctttgccaaaaaaaacttcctttctcagaactcatgtactagcattgagcaatgttatgattctctgagaaactctgaattaccaaaaagtctttctccattaaatagaacagaaaaggacagagaaatgggtgaacgtttgccattgacacattgcagttgtactctttaccatgtgaaatttgccgtttggtctattacctgttctccaacctgactctaaatgggacactctgccctctacccctcacacgtaccctcacaacttaatcattgccactctaaggtgcacacaatgggttctgcagatacctactgcttgcaaaaagacctttcatgagatattggggaaactgcctagtactctgggtgctttattctcaaaaaacaaacaaacaaacaaacaaaaaacgagttggatataggtatttttcccctgatttaatgctactcttaatgtcattttcttttattaaatcctttcttctgcttttgatcttatttatagcagagccactggtcatatggaaactattactgtatagctgcgagatgaaagacttcatggcaattaaataagagtgaatcatttgggccaataatacacacatacagtgaggtaccatttgtgtccaaaatgccctgtgttgttcactttgtagcaaagccattgagctttacaaagggctttacaaaaatctgctttttgtcagaaatatgtagtctgacaatatgaaaacacatgttaacacacagtccttagctgcttgcttcttcacacatacacagtatctaaatcatgccacttattgatataaaatgaaattttcacttaaatttgggatattatttagttgtgttaagcgtcagctctttaaaaatatatttggataatctatatcaaaattcgacccatcactcaaaacctgcctaaaatgtcatgttcttcttaaagtagtccctggtttcctaaacgggtatgacttcatcattttttaaaaccctacatgaccttgtactcctttatgacattcatcgtattttgccttgtatagtaatattatcccatcattaaaatatcagtgcctgggctaggcgcggtggttcaggcctgtaatcccagcactttgggaagccaaggcgggaggatcacaagttcaggagttcgagaccagcctagccaacatggtgaaaccccgtctctactaaaaatacaaaaattagctgggcgtaaaggtgcacgcctgtaatcccagctactggggaggctgaggcaggagaatcgcttgaacccgggaggcggaggttgcagtgagccaagatcatgccactgcactcctttctgggcaacaaagcaacactccatcttaaaaaaaaaaaaaaaaatcagtgcctgcaaagtcatagacgtgtttatttttccttgcaaatgcccatgtagtgccttgcatatagtacactttcataaggcgcttgtcaaattaagtgaaatgtttatttgatagaaacatgctaaatgtatatttggcaatatcaaacaattaaatttcagacatagtctcacagatccatagcatttgtgtcatcatttgctaagcatctaactgcacattgtactattacactcccgtgcagtgacctgtgcagttcctgtccttgggatgggatgcccacaaatggagacaagtataggctttacgaatggcagcaaaacaaacttattgaagtttatgccctgcaccattcaacaatgaccttgaatgtgttttaagggtggtgtctgtaatgcatagtgagctcgtgaggtgacaagaaagtggagatttctggagatccactcagccctgaagggtcagagagtgaggggatctgtgaggctaataaaagagaagcagttggtgagttaggaggaaaaaactagcccagcagacagagcagggagggctttgctcaagccttagtgatgtgggcgttaacccagcagatgagaggccatgcgtaggtaattgaacattgatagtgaggaatttaaaaataggagggaactgcattggtcctgggagtctaggtgaaggatgcatcagcacaaggtggacctcttagactggatccatacagcaagcaagagccaggctgaagccttaatattgcatcaactgatggagagagaatattgcatttaaaagatgagtatttggaaagtgatggggaagaaatggttcattcgtttaggtgagcttctttatacttctactctcttttcaaatatattacagtaagcatgtgttacttgaataacaagaaaagcatttaagaaataaaggccaatgggtaatggtaaatccctagggatccttagggatgggccacctggactggctaaaaactgtgtggaggtcagcagcatgactgtgcactctcacaggtatgcttgcacttcaggcattcagaattccaagtgtaaatcaagtgtccagttgtcttttcctttaaacaaaagctgtttacacataattgctagacttcaccatattctctgtgctagatatgtttggttcactaggatggattaactttagttccataccatctacttactagcctgctatgtggagcaaggaagagatagaggaatgggctctgttaatctgccagtgtccccgctaggtgagctctctccagttatggtttccactgtataggaaaatgatgtcgagaattgagggtgtgggacacagaagagagaaatgaaacagttttaatagatggaacgtatgagttagtacaagaaagatgaactgaggtcggctcacatccgtttgcatttcttgaactatatcatagaatcattcatttaaccattttggtgaacatccaggggagtttcagcccagctgatcatatgatagacaagcactgccaaggtcaggatcatttagatcatgtttaaatcctcttgaaaattactttattatctggagaatcaatattaaataaatctccaagaattgcacaataaggaattaccttacatttcatacagaacataagagaagctgtgatgtttctggaaaacaatgtaggtgttctcaagacagttatgaaatcttctcccgacatacatgttaagaatcaagtaaaaatccaaacaaaagaattgaatccagatctgatgttaatgaaaagtctcttaaaggtttaatcacatgtactaaagaaaaatcatctgataattttttaaactgagaaatatggaaattatgtttgtggttggagtgtcccagatgttagctctttctcccacaacaggtggttattagaggtaggtcttgttttctgcagagcctctgtgcctctagtgttgttcctcacagtatctatctactgctgccattccatgaacttcctaattcccatctgtgagccattaaaaaagtttgcatgaccgcttcccacctctttaaaagatgcacttttgtactaaatggtgttttgcacatttgagaaaataagtttgctttcctctaatatgacagaggtctggcaagataattgaaactgaaatctagtactctacaactgtcatgtataattgatatttcatggggagattacagttcagacaccaaaactgttttctgtatcaatgggtttctaattacagtgaaaacccatcagcttttcttttgtgttaatggaaaaacaacagagaaaagtaacagtaagttgcagttaccaggacttctgtctttgtcccattttgttgttgttcttctttctaaaaaccaaaaaaatctatgtccaaaattggaaaccagatgccattaatagcaaactttaattttgatgtaccaaaatgtttataatagtatatccagttttgtgtcattatcacttggtctagaaactgatgacaagtttcctaaagttcccattgtatactcttttagaaggattatggtagaatagaagtgactgaggtctgaaagcctgttttgaagcagttatctctggagataacattaactaggattgaataactgccaaatgaaatttaatacattttcccatccatgaaataggcctcttaaatacaacagaataattactttcacaatactccctggaaacaaagagagcaaaaatattgaatgtcttttttgtttgtggtgtttgttgttagctagaggataaggacaaggatatttaccacaatgctgaatgcatctccatataaaaacagccttgccaacagccacctaatttgaatctgcatgtcttttaaatctgtttatgttggagggatcgtggcaaatattaaattttataatttagttagacatcttggccttggcctgagttaatgaactatgattttccccctgcaataaagaaaaaggaaatgattttcctctatctatatatgtacgtatatatatgtatgttatatgcttgtacctaggtgtgtgtatacatgtatggacacacacacacactgttttaaaacaaaagctctgggaaataaacgcatcttgccccctaactctcctcccctctcctatataattgttcagtgttgtaagttttctgagttcaaaatctgttttagatctccaactaagcatcgaaagttggatcttaagtcacttcaccattcttggccttagctttctttgtaaaatgaagagtttgacctaactgatatataaccaaggtcctccaagccctcgacgtctaagttctgtgatttaaaagtgtttctatcagtttgtcaagccctttcttggaaactaaggttatttaaaattatatggtgcttacgtgattcaaaataattattgcatatctaatgacatttaattatttccattgacaaattcacacaggagaattcaaatagctgtgttggaatttgaatataatttgacctaagatacaatgtaactcagacatttacacctacatgtaccagtcaatatgtggacgggacaggccaagccgcctgtgtttggactacatgatcttatccccccttcctcgtttgtagctctctggaccgggaaaatgcctgtcattaaggtggcccattcatagtatgacctatgtctgcttcaaaatgagctgggccatccagtgatcttggcattctgagcttagaaatacaaagacaaagaggaaattagcaggaggtacagaaccagaaagaatgcaccaagaggtatcatgaagaaagagtccaatctgtcatcatgagagggcagaagccagagagaagcagaggtccccccagagagaggagagaggctgaatagcccagcagaggcgaggagtggcattcggttcccaagagctctctgagtccaaaacctaagctacagaaaactatttatgataaatcttttatttgaacaaactcaaataggtttctcttccttactattaaaactaccccactaaattgatcagcatacaaaaatccccccaagaatcattatgagttccacaaaaaccaggaccacatctgagttatttctcattctatccccagtgtctcccaaagtgacaggcatgagctagattagaaaatgtttgttaaattagtaaatgcattctctgatcaatcaatgaataatcattgaataatttttaaatttcacttctatcttctatttttagcatagatatcactaaaactgcattatacgtgactatgggaagattcacatttacaatgagtattaataaaattttcataagctggcttttaactttagactattgttatctctatgaaaaggttatcaaaatagagctttaacgaagtatggattttctaaaaatagggacgaaatgtcatgcttagaattgacttgtgggaatctcctttctcctagtcacattatgacgtatttaagttcagaatgccaagatcattggatgccccagctcattttgaagcagacatgggtcattctatgaatgggccgccttaatgccagtgggcaaatccctgacccttgtatatacagagaacagtgtgagtttctccatctatttctgtgttattctagcgatggatttgtgccgacagtccactgtgtttcttcccttgtctcttatgtgaccagaaataatgtttctgaaagagaagaaaacagggttagaatatgccatctgtggccaaggaaacaagcaaagccaagccaattattcaaattggaatactcttccacagccacaggcaatggagttgatcctatcctggagaatcaagctcattattacatggctctggacctatcagagggcattcacatgacctggaatagacacaaggggagtcttaaaacatcacgacaaattagccggcgtggtggtgggcgcctgtaattccagttacttgggaggctgaaacaggagaattgcttgaacctgggaggcagaggttgcagtgaacggagattgcacccctgcactccagcctgggtgacagagcaagactctgtctccaaaaaaaaaaaaaaaaaaagtcagaacaactttgtctctaacattctttatggaaaatgattgatattatttaagatgatctatagaaaatagatggagttaggtaacatatgggcctaaaatccaaacaaaaatgtagttggaacaactatatcctcagatatatttataatatttaagagtttacagtcattgtataggggaaagatttaaaattaaatggattttaacaaaatagagacaaagatcaccgtaactgaagatagcttgagttttgagggggttcttgaactacacaggctattatttctatataacatgcaagtattttcagtcaaaacacatgattctgtctgcagttattatgtacctattacataccagttgtcatgtacgattgcatgggttctctttttctcttttgagaacttacctcaatgtgatctagagggaaaaaatttcaggagcagtaactgaatatattttaagtaaaaagcaaaacattactcttaagttatgtcacagatgcttgcaaagaaatcttgagagtgttaatgattctgaaataggagtacacttctcctctatgctcaaatctgtggttaccttcagtgattttgacttagagtcatcctttgtagaaattcaagaaattagatccattgggaatacaaataaatatgaatcagcacgaagaattatttaggtttatattgattgacagacataaagagccaccatttgatcaaggcctgtaaaaattcatgcttacaagttgacatcttagattgaaaggataatcattgattgaatccgttttctaatgcatgaatataaaaatagcaaatcaaaacctcaatggaaaatagctatcatgcttctgaataaaaattaaaatatataagagagtgagttacaaatggttgctggagcaggtgggcgtggtctgcctataagagagcagacttcagtcacagaggaaaggagtggtgtggcaggcaacagggttgaatatgtttaaaaaaaaaaaaaggtttgtacttaacgccacagagctctagaagctgaaactagaatcagtgagtgaaatctacaaagaggccaatttgtggtaaaaatggaatgggcttctttgggagatatcagtctcagtacatttgaagcaccccacagaggccaaataaccaccattcagaaagttctgtgttgcgacacaggcaccggggagcagtgctggacttcctacatctctctgctgaaacattcatttatacttcctgaggctcataagcctcaagtgttgtcttattcttgctgtattttgaatccaaacaattaatatgatttatgtgatcatctccacccaaaatttaaaaaaaagttggagtgcatacacacacacacacacacacacacatgcacacatgaatataaaaatggcatacttcaggatcaattacttaaatatattttcagtaaaaagcaaaatattataggtgatacttaatacatggctgcctttaaatagcatgtgcttattaggtcctgtgaatttgttgttggttcagatacttattgttgatgcattctttggaaatacccttttaaaatatattggtaacacaagagtgatgattctcctttctggtttcatatttttgactggaaaaaaaaataaacctgattcatagcagtataaatgtatggttaattttttgtgttttagacccaccgtcctgtgtaaatgctcacttaaccataggctaagaaaatacttggaaatagaaaagaaaatgtgaactactgattgtcctcttagttgacaaatgcttcatgttttcgcttgaaggcatgtgctatgaagtaggcagttgctgtctcagtgccacaagttcaatgtctctggaccccagagtcgatagtagtagttaataaaaagctcagcagtatttttttaatgaagtaatcatgctgtactctataattttattcttggaagcataaagagtatttacaatatggtgtctttctagggtcagaatagtgaggaaaaaaatggaaaaatgtccaaacatccttccttgcatggcaatgatggcattactggtgtgtttaataaaacctttattggtacattttccggtgtggtggcattggcagaaaccatccccctttggatttggaactcagcagctgatgaaatacagtaaacattaatttggaatgggctgccagttttggaaagccaggtgacattttattatatttgtaccaagcagaggctgtgtcccatactgctgtagcttccgctgtcagaggcttagctggcattatggaaaaaaaaaaatggcaggcctgagaatcttatcccctgaaatgaaagtcgaatgccaaattgaaattcctgtaggatttccgatagcaatgggggaattgagaagctcacaattaagcatatgggcattaagataattgtcagatctgttggcggacatgatagaagacagatgggtacgaatcagtgcgctccactgcagcaccctgggaggcaatttgacgttttacctgcctgagctactctgccatatttgtcactgaatgtacagcacggcatcttactgagtgttaagtgttttcgccgggaactataggtgcatgtgcggtccttcagcgccctctagtgaaacgcgtttgggagtatggtttttgaaaagccagccttcatcaggtcctcttggcctctggaaatagctgtcgcacctccggttcctgctcacctctctggttcctctcgccctttcaggtggggacccatcgtgaagatggcgtggccctgagaggcagccattctcttctgccaaaccaggttccggttccacagcttcctgtccagtctgcgacttcccctgacctgaacccaccccaggacccttacagaggtaggttggcctcaccagggcacttctgacctcactttcacaataggaccagtgttgatacccagcctcttggtgttcatccctcaagaagcactggcagaaacccaggaatcaaattgggcacaaaaatggtaaggaaatggcaaagtatttagaacttcgcccgctaattgtgtttctccagggactgttttcctcaaacatcctctgaaatcctggtcctatatcagcagggaatgaggccacagactgatgagaggaaattttattttagctatttccacatttttctcattcaggtcctctaatgtggttagttgtggcctgaaaatgatatttccaaatgaataggaaggaaggaaattgtttttgttgtttaagatggaaggaaatataggtgcatttaaaaaatggagcttggttgcatgattttcgctcttgagtcatctagccctctaatgattgcctcataccggtgattacgagcggcttttcatgaccccaggaagttgggctattgctggccagctgactaggagtcgcttagataacatcttctcagtcccttcacatttaatataaaaatgataacattgccacaggaatacatgtgggcattttttcagctgttcaacattgtacagatctgagtgtcaattatatgtatgggtatgtctgcccattttttatgaataataatcattttatggactttttttttttttttttttgacagagcctcactctgtcgcccaggctggagtacagtggtgcgatctcagctcactgcaacctccacctcccaggttcaagcgattctcctgcctcagcctcccagggggtagctaggattacagacatgcatcaccatgcctggctatttttcgtatttttagtagagacagggtttcaccacattagccaggctggtcttgaattcctgacctcaagtgatgcacccgcctcagcctcccgaagtgctgggattacaggtgtgaaccaccacaactggccaggacctttcttatcaggaggctttggattttgccctctttgtcctaaacctgtgcttctcaaactgcacataagcacaacctgagcatcttgttaaaatgcagattccacttctgtaggtctgggattgtccatttctaatgggctcacagatgatgaggccgcatggaccaaagtttgagtggcaaggttctagaatacacagattacaaataaagaggaatacttgacagatatgcttctacctttaaaaaaattactacattagggtcgtgttttaaaatgcagtgtgacttggaaagttgagcaatgataaagctagaaatttctaaaatgagtagcaaactgccttccatatgtaccattttaaaatgctgattacttcttgagaataagagaagcctaatttcagaatatcattagggtacctattgaagtcttgactgcacatatttagcatactccctgggaattatattttaaggacatttttctattaaatcattgcatatggaagaaactcaatataatagctgatatttacttgggttcttaatcagaacattggctgtgtgattttcatgattatgattttcattgcaattaagttgatgttttgtagacagtgaaattaccatctactccaaaagattgcaaaatagaatttaaccttagagccaatgcagggaaaacttgtttctgcaggtgcattttttgaaacttcaacagatagcagggggaaaaaaaagtgacagaaggatcacagttcagcagtatgaattgtctgctggcagccttgcaatctggtgtgcaggcagtgagattgtggtgtacatgtcacctgatttctctttttcggcaggcatgccaccaggactacaggggcagagtgtctcctctggcagctctgagatcaaatccgatgacgagggtgatgagaacctgcaagacacgaaatcttcggaggacaagaaattagatgacgacaagaaggatatcaaatcaattactaggtcaagatctaggtaacagtatataatactgtcgcttcatttaattcctttattggactttgatgaagtgaacagaacgggaagaaactattcagttttttcctggcaggtaaatttacagctgaaaagaaaattaaaggcctactctagaagtactaaaagtatcgtttcagatacctgtactctattggagcctaaactgttttggcatttatgaatctggacccaatgctaatgacacacagtgaaaaaatttgtctctgattcaagtacagtttatttgtaaaactatacttattctacaaatttggtcagaaatgttgtgtctataatatttctaaaaagagattgtagccatgttaaaaactcaactgatgtatgtgccaactataactcttttcttacctctaaagtaagaaaataatttcctagatttatcctaaacatgctgatgtatataagagtaataccttaattgtttatggtttttcttcctggacactcttttctacagaaaacacaactgcaggaaaatagcttctgtctggttttcttaaatatctgctatctttaaattcaaatctatatctccttgaactttaatctggtaatcagatggtttttgaataccaacacccgtgtactttgcctcaattccctgaggttgtttttattcacaaattcaaccaattgtcctaagactacagctttccttctaaaggctgtggttctcaaggttctatctggaatcttttgtgaattaagaacatgctgcctctttatgttgctgttgtaattattgagataaattccgtgtcttgccacaagtttaaaaatgccgaatacttctagataacccctttccttccttgttgtctttttctgattcttggccactttggcaagaaatcccaaggaggggatttcatacctttagcagcttctgtgttagaccagtcagttcttggtaatttaacttattgtggccaaacttatgcatgttaatggattctttgaagttttggaacaacattttcattcgctgttgagaaccttcttatttaaaaaggtcactcttatgacatttacttatgtatgcctccaaaactgtattataaggcagtgctttttcaaatctaggcagttttatttgcataactagtttatttgtaagtgaataaccaattctaattggtcgttagcctgaaaatctttggaagaaaagttcctattttccagtctcctttgtgtaaggtgtagcatttgttggatgtataaaaatatcacccaaatgctcagcttccggacaggcctggcagagactgttttcatttgctttttacagcctatttgcatagtagaatataggagtgaattaatcattactgatttccttggcactggcagcagttgggggtgagggcagaggagggatccgcagaaggcagagaaagagggccttttccagtggactcagttgacttccatgtttaccatacacacctgtggcagacagtgccatctggaaaggcgcttacgctatggagagagaggagcctggtcttacagcatccttctgtggtgtcatcctccttgcccctaacttttctccttcacccaagtgttcttgacttacgtgcattatctttatgtgtaacgtatacttgcaaccgaagaataccactcccacttttgattgattggagcttctcaagtgtaattggtccttattgccacttggaagttacccagagattctccaaaatggaacatcagagtcatatattttaaaccagcattcattaaatatacatttaattgagtagataatttcccacatcttccaactccgaaatgttgtgattaatcatctttattctgtgaacatttccaatgtgtgaaattaccctttaggttaattgttagtcacttccatggagtttcttgtgatggggagtctactgatgttcagtgaagtttgtttcattttctgtgtctctcataagccccccaaaagtcctcactcatgtttattcacaatagtcattcagagctttatagcacgtgctgctctgccttcttgagacaagacgtcgtgcacacttctcttttttacatgacagcccttggaatatttgaaccctgctgctgtgacgacttcctcatatgatatgctttccaggtggctcatcatcctctttgccttccattcaaaagtttctaatttgtcactgtaacactcagaaatggacagaaccgatcttatcttttcagactattctgggcccggccatgcatttgttatgaatcatggaatattttggttttcacaattagaaattaccttttggcttttttttttttttttttttgtaagagacagagtctggctgtgttgcccaggctggagtgcagtggcctgatcacatctcactgtagcctccacctcctagattcaagtgagcctcccacctcagcctcctgagtagctgagaccgcaggtgtgcatcactgtgcccagctaatttttttttattttttgtagagacgaggtctcactatatcgtccaggctggggttataggcatgagccactgcacccagctttctggcttcatttttgactcacaatgaggtcatggtcattcataagctgcaggtgtttggtttgttgaatcgttttgcatgactgatatcagttcaggtttcccaaacttgttctgtggatcataaacatctataagattaaagaccatggaagtcatgtttttgtaactttttgtttaatacatagagaaaatgagactcacatagtgggttgaccaggccttcaaagcaaggtaatggggacacctgaataaaagcctcactgtcttcactcccattgctctggtgtcttacatataggcctttcttcttactcctgttaagctgccttgtatttttttgacctatcaaaatcatttttcaattacttgtttcccctagatttcagatgtcacggtatgaaaggttttatatatatttaaaaaataaagtataaacataaagtctttttgaagcgtggttatgcaacatatgctaggcgtaagttggtgaatgcctgctttgcagagtgtaaccccattgaataaaaaaagctttgttttccctttctgcccccctgtatcagtatgggcacaccctgcactctaactttaatctacgtcaccctcacctgtttggtttgggtttaatgtctgcgagaaaaccaaatatcttgtgtattgtgaactgtcaaagccatctaaaccaatcccaaggtcaagtggatataaaaattctgccaaaaacatggcataagatggaaaagttccctgaaaactctggaagaaaacaaagtaatgtagacaccttctttttccccacaccattagaaaatgttgcatcccttttgtcccacagcaataatgacgatgaggacctgacaccagagcagaaggcagagcgtgagaaggagcggaggatggccaacaatgcccgagagcgtctgcgggtccgtgacatcaacgaggctttcaaagagctcggccgcatggtgcagctccacctcaagagtgacaagccccagaccaagctcctgatcctccaccaggcggtggccgtcatcctcagtctggagcagcaagtccgaggtcagtgcaggccagcctccttgcagagctcgtgaggagcttgtggcaggcacaagctgagatgggcacgccagtcttgagcagtggcagacagtagactttcaagcatcattccaaagaattgtttccattgcagactgtgtctaaatccataaggcagcatccctttctcctgtaattaagttgtgggattctcttataactaagattatattgcaactttccctatatcctttcagtaatttgagcttagtttatttgctttaccaacctttgcttactgtaaagtggctgtacacactcacatgcagttcaccttttactagtgactgaccaaatggattgccacagtacttagtaactgttccttttgttctgtaatataaacactgagaaaaaggtcagacacgcaagaagagtgcattgctgccctctgccagaagcctcagcattaaacaaaggttctgtgctttaatcctccacagaaaggaatctgaatccgaaagctgcgtgtctgaaaagaagggaggaagagaaggtgtcctcagagcctccccctctctccttggccggcccacaccctggaatgggagacgcatcgaatcacatgggacagatgtaaaagggcaagtttgttttcagccatttctgagatcgatcattcaaaactctcatcagtgtatcagccataaaagtgaatttcacccaaattgacagatattttctttcatggaaaaagaattttttttaaaaaaagcatactttttctgttacaaatatattaatgaattttttctctcttttttcctttctcaggtccaagttgccacattgcttcattaaaacaagagaccacttccttaacagctgtattatcttaaacccacataaacacttctccttaacccccatttttgtaatataagacaagtctgagtagttatgaatcgcagacgcaagaggtttcagcattcccaattatcaaaaaacagaaaaacaaaaaaaagaaagaaaaaagtgcaacttgagggacgactttctttaacatatcattcagaatgtgcaaagcagtatgtacaggctgagacacagcccagagactgaacggcaatctttccacactgtggaacaatgcatttgtgcctaaacttcttttggaaaaaaaaaatataattaatttgtaagtctgaaaaaaaaatatttaatttaaaaaaaattgtaaacttgcaataatgaaaaagtgtacttctgaagaaaactacatgaacgtttttgttggtattcaagtcagctagtgtttataattactggatattgaattaggggaagctcggctgccctagtaacaaaaccagcaaacgtcctgatgacaacgaagtgatgacattagccattccttagggtaggaggaacagatggatcttatagacctatgacaaatatatatataaatatatatataaatatatattaaaaatttagtgactatggtaagcttttgttcatttgtttcagacttttttctcctgtaaaaaaatagtactgattaacttttttaaaagaaagattttactgtaaatatggatttttttttttttggtcttatttctgtccctttccctggtttgttatcgtaacctgtagtgccaactctgcttccagaggggtagtgcaggatgaaatgctgaccctgatgttgcttctcattcataaataagtagaaagttgtttctccagtcttttgggaacacaggacttaaaagtcacatcatgtgtagatattacaagcagcattaccaagacatggcaaaaagagtttgtctgaattgtaatgttgcgtttgtgaacctattctgggattttcagaggtacaaggttagaatgctacaatgttaccactgtgccttccaatgtttatatcatcggaaacataacataatcaaagtggctgtgatttaacaaaatgattaaagtgttacctacctgtgtagccgaagtagtgtgcagtgaggcgtttctgaatacatggtcagatttttggaaaaaaacaaaaacaaaaaaaacaagtaaagttcaaaaaccgtcaaatgagaaaattgcaagtagtgtgacagagctgattgattttgttgctttcttgattttttttttcaaaatgggtttactaaaatgtagatgacttaactgcctcctccttcgtctgaaaaatgccaatattcaatcatcatgcagcattataacaagccttataagtcctaaagcattaagttgcacttttttgaggaggggtagtgcagtatttctctggccagtatgaatgaagtttatacttaccatatttgatagaaacatagatcaagctatggcacagcgactcatcagatagctagctttgacgtctgggcacaattgaaccaacttccatcgtgaatctttataatgattgactttggtgtatagtgcagtaaacaaatagtgctcctagttaagtatttgtcagcatccttttgtctctaacttgtttctatttttacagccacacaattcttggcatgtattaagaaaaaaaaaaatccctgttcaagtagtttttccacctatcagcactgagtaaatgccataaatccattgaaatggtctaaatgttccatctgttctcctgttttgccagttatatagtaatgaaatacatttgtaaattttatgcaacaaatggcaaacgtatcattattttgaaattgtgtatgtaaaagttatatttttacatgtagactcttgttattatgtgttttaatacattgtatcagtttttgtttttttttaaaaactgtggtttaaaaagaagtctcatttaaatgaaatagctacaagaatcagaattttatgttcatttctgaaaatgtaagaacaaataagatagttaccacgtggtcatcttttacaaacccataaacattttgattagctgtgtgtgtgttgaaaaactgtaaatatgttcagtagcgataaaactaaaataactttgatttgttgataagttcctaaaatgtggaggtggattaaaaccttaggagaatagcagaaatcaaacttcatgaaaagttattttggggctttcctgtgaaatgtatgaacaaagaggctcagagaaggacatggaagacaataatgtatactctctcctcctccctgaataatgaaaaccatgtgtatttgttccctccgtatgttaaagatttccttttagtggtacattctgcactcattttgtatagtctaccaaggcgggtatccctaggaacaatattatataggaagcaggtatactctgatcacattcaggataagtgtacagaagaaaatacggtgtttactctttagggaactggaaacactccctgcattgatgtacattttaagaatggcacttttgatacatgttatcataaaggtgcttaatagagctgaattaaagtttttcaaatctgtaaacaaagcaaaaaagtaaattgtagtcatttgattattttttaaattggtgctttatattttgttctcactcagagtaaaagctgcaatttattgttcaccagctttgatgtattcattactcagtaatgcaatacctctattgttgaattccctttggaaataagtgaaaattctaacggccactgaaagctgctcgctaggttttgcttggtggagaaacataatctgcacctatccatattaattgggttgtatccccattaaaaaagaaaaaaagggaatgtggcctttttagtgtgttttttattgttgttgttttgtaattatcaaacccaggtaagatattggtatcctgcactggattttcaaatgaagttcagcagaagacagttaagattaaagtactatacaaaaatttcaaaagggtccatactacgctatctgtatgacgacacttaggctggggatctctttcagaaactcggactttaaaagcaacttggagcagttgatccacctccacattcaagtaatttatgaatatgcagaatagggatctgttcatctagaaatttttaccatttgtcttctgtgtagctgcaaggaacactaatgtttatacaactgtcagtccacccagtggtgcaactggttctgattcagtcttccgattcctttttatttttcactttttcctatttctgaatttttttttttatttgtgatcttgattttgatgaggggttggggagtggggagggagtcgaaccaagacttggagttaagaggattttcatcttttgcatccaacaggcagaatatgatctgtgtccaaaagtgaacttgagtcaggaatgaatcaatttcagcataaacaagcacaaaaatttagtctgctggctgactggaagcaaaaaagtcaagatggaatatgatgaattccaacacaatggggcaccaaggcctttaggcctctctttttattttgctttggttttgtttgtttttctttagagacatgctctttctcatgggacttgaagtggactcatctttgtgcagtgctggttttgccatactcatttcaagtattatagacatatgtaatggtgaaaatatatgaactgtggcctttttcattcttgttacttgtgatgcaattaagtgaagataagaaaaaaaaaaaaaaagcagagatttaccatgtatcagtgcctggctttttgttataaagctttgtttgtctagtgctcttttgctataaaatagactgtagtacaccctagtaggaaaaaaaaaaaactaaatttaaaaataaaaaatatatttggcttatttttcgcaggagcaatccttttataccatgaatattacaaaaaaattgtcagattctgaatatttcttctttgtagatttttggaatcattatgagtaaaagtttgttactttattttactatttaaaagatgttattttaccatgtgttaccaagatgaaactgtatgggtagcttttttgtttgttttttgttttgtttttgtttttgtttttgtttttagttgtaggtcgcagcggggaaattttttgcgactgtacacatagctgcagcattaaaaacttaaaaaaattgttaaaaaaaaaaaaagggaaaacatttcaaaaaaaaaaaaaaagataaacagttacaccttgttttcaatgtgtggctgagtgcctcgattttttcatgtttttggtgtatttctgatttgtagaagtgtccaaacaggttgtgtgctggagttccttcaagacaaaaacaaacccagcttggtcaaggccattacctgtttcccatctgtagttattcgatgaagtcatgtacatgaccgttctgtagcaataaatgtgccatttttataaactgtttctgacacttgtttcatttcattttgcattgtccatatagctatgattctcttctgtaagtaaaacgcatctatatttcattttccaagtgttggaggtattgacagcttaacaaacaaaacatacaaaaaaaatcacaaaaacaaattgaaaagcaaagcacatgattgatcaaggaagagatgcccttaatgaaaatggaacgggatgcatgcaaaacaaaaagaaaactgtctagaggattaactaattgaaggaatataattaatgtgtgtgtaacactgaagctatgcatttgaagagctctgaactgcaccagtgttttcggttgtgctgcaggttgctaagtcaagtcagccttaaccttttgcaccagttggtcggctgtttggcagaacattctcagatcttttcagtcaaaaatctaagatgatttattttgtatcactttgttaaaagctgaatattgttaactacagttaatattaacactgtatttatactttctcaaactacatccgccccaccacttctggttgcctctgttgactattaatccagatgtaaacaaccagatgtttttttctaacttgtacaaactgacgtgtgtcaactatcatggaaggaaaaaaatgtacagattaaaattattcagtgttatgtactgtaagttaatatttttgtagaatggacatcaatctactttgcaaaatttggaggctatttcaacattgcactgtagaaatgtaaagtaatgtatgcaatgtaaaggaaagcccgcggtagctgagcgcttcataacagaatgttctaatcaagtacgtggtatttggggatgtctccaatattgctcttgtattctttctaattgggtttagtgactagttgaaggaaaatgttataacgccatttggttcacatgtgaagtgccctccatagccaaatgttgggatttttttttttttcgtttttggttggactgtttgcagatatttaaattttatgaaatttccaaagattttggttgataacccccttttaccttctaaatgatttgagatgttcttatgttcttactgtgtgttttaaatatatataaaagagccacaagcatttagtcttttagtattatatttgatcatataactactactgaaaaggggtgggggggaatgtgcctgtgcacccctacagtatcttgtgtagtgtctattaacattgttctcttttagaggaccacattaaaaggtacattaatcttacattttggttcattttcaaagggaagttaaattgctggagaacctaaagtattatccagaagttaagatcacagtaattttagaaatgaagaagggaggagtatccaaaggggctgaaatagggaatcatttttagcctcataattcggtccattcatctgaaaccaagtgaaatttatactctgggcttcatctgtagagcacctttctcttgaggaacagcccaagaaatttcatgtgtaagcccctttaagggagacattgaaatcaacagaaggaactagtgtgctgcatatattcaaatcacaccaggatcgcacatttaaattgcacttgggacgcttcatgctctgccagccagaagatctcttgttccataaggcattctcattcaaatggtttacaagtccacattctcactggtcacagcctgtgttataaagaaacatggccagtctttaaaggactagaagggcaagaagagccagagtcactttggtattcttgagagatcatttaaatcgataaggtttgatgaacaaaagtgcctcaagtgaaaatccacatgttttcaggaaaggaagacagtgtcacagctatgagaaagcaatagttaaaagccaatgtgcattgaggtgcagccctcagagttgctgggtgttgtggggtcaaaaagtgaaatcaaccaggcagccagtatctgggtatttgtttggagtgttagatattaagattactgaatctgtacctaaatataacaattatagtttaggctttttgctatggagtggtgtgtatgcacaagtgtttcttgccatttttgagttttggacacttggaagatgaatgaaaccactccatagagggggggaaaaggatatatgtatgaaacgtcacattcaacttttttattttttttaagagacaggttctccatctgtcaaccaggctgaagtgcagtggctacaatcttaccaatgcagcttcagcctcctgggctcaatgatcctcctgtctcagcctcctgagtagctgggactacaagcatgtgccaccatgcccagcgaatttttttaaatttttcctatagacagggtcttgctcttctgcctgagctagtcttgaactcctgaactccagtgaccctcccaacttggcctcccaaagtgctgggattataggtatgagccacggtgcctggccttgacaaatctctctagcatctaggcatggatacttgttcatgggtcaagttaagaaaatctggtgtaagataccaaaatcttcaatacttgggaaaggaaaaaaacaatcctatttaccttgattgaaatggttgagcctaaccagaactgggctggtgtctggcttttaaagaaagaccctttgtgtaacagaaaataatactgttcctattaacatctgttacactatatttagaagtcaaatggctttagcattggcatgaacattcttctaagaggaagctgaaacttgccaagtgcaaagtgaaaatgctcatgcagaatcagacttgctgttttgaggtttttgaccataaccagcccacgagtgaggaactcttttgttcttgagcaaaaaatgacaaaattttggagaataggaaaacttgatttttgtaaggaattattttattttatatatctttatttgtgagtctcagtgagaccatttcaaagatgggcaaatgcaggcaaagtgatgtgctcaagttcttggggctaaaacaagtagccagtatcctgattttgagcccagggtcactgcactgacccaccttttgagcagccacttggcttcccacctttaatattaggcctcccccaccagctg

SEQ ID NO: 780 - DNA, 311814 bp, Homo sapiens
aaagatatttaattcattattaaatctcagttcactccaaagaaaaatgttgtcagatgtgtttcttgtttttgtccacacagtaaatattaataatttggttagtatgtgtgtggttaaagaagcactgctacatacgtgtcgttgaagaatattgcaatgttgtaaacaaatgttttgtcgtcagatttacaactgtgctcaattaataactgacaagctttcaggatatcatacattcttaggatacccaagaaaaggcaaagttatcacttaggcaatgggaacagaaaacgattcacatttgtcatcacccctgagtgatagattgtgggtagaaataaataaacaagaatctcagacatacaaaataaaattatttctttataaaaccatgcagttaagcactcatgttcataggaaccttctagaaatatgttattaatagtcataatacagttgcataaataccttttataattagaagtcattttcttctaatgaaattgcttcaaaaaaattaaatgaagtgatctcatcaggaggtgatattaagtacagtcctctaaaacagcacatctgtattgtcctgtggatactgtggtatgaatatgatggggtagatgagtctcactcccatgcagtttataaggagtcacagctgctgttccagagtggcaaaaagaataaagctggacaacatgagggtgccatttcacaccctaggtaattgttactatgagcaaatggtggcctagtgtgaccaaatggtctgctttgtttttgtttttgtttttaggggtagctggatatctgaattttcatatgcaatattccaatttttaaaggatttcaaaaaattcagttttccaaaaacattgtctgagccagtcaaagcaattctctcgccaccagttgccaacttctgcttgaaagataaacagcgcataataccagctactcaggaggctgaggcaggcagattgcttgaaaccaggagttcaagaccagcctgggtaacatagcgagatcctatctcttaaaaaaaataaaaaataaaaaacttagcctgcacatggtggtaagcgcctgtagtcccagctacttgagagcctgaggtgggaggattgcttgatcccaggagtttgagaccgcaatgatctctgattctgctactgcaatctagcctactaaagaaaaaaagataaagagccccactggaatttgttgtggctacaaggttcctactaatcctaagagaatattgcagtggtaatgggcctatttgcaagcattattagaacttggaaataatgtgaataaacagcaatcctgactttaaaaactgcctctctgcttcaggtacaagaagggccagaaattgtctgcagatgggcacttacaggttttacacaaggagacaaggcattcggtgttcattccaaaggtatgcaaggcagacgcaggcctctatgtggctcgggcccaaaactctagcggcgctctctcttccaatgtcatcctccacgtgacaggtaactgcaggctgccaatcacaagagtaaactggataaccctgtgtgtcgtctatgttagtgtgtccctaatgtactggctcctcacacaataactgtggtgttggcaccaatggacatcattctcatgtgcctaaagaaaagtgccgccgtttatcttcctgcacctcctgcaaagcatctcccaccaagtgtatctccagtctgatcaccatacttgtttggctaataccactgctaggtgaaataatcaaattttctggagcgtttaatatatttgagaagcttggtaaattatctgtagtggataagaacagatttttgtactctagaaacagatgttttcaacataatatgcagcaaaattattctatgcctattccctcctaatttaagggcgtgcagatgaaggctgacatcggcatagaaatgtgctaaatttcaaatatggttgttcaataatatatttttaattgtattttaaaacatccctttgtagggaatatcagtagaactattgaattgatgttgtatttttgcattagctgtcctttaattttgctttccatgtcttgatcttgttaccgaaatgcattctgtgtaatttcaacgtagactacgttcctgagtctgatgatgtcattgtaaataatcattcctcatgttgctctcacgggtttgacattggaggatagatgtgccatcaactttaaatagagtttccatcttttgtcagctctgcatgtcatacagcaagatggaacacaggttgcaagaaagaaccaacgttattcctgacattctattgatgtgttttgagcagcaatgtgtaaccaggtgtttctgcttctaatcttgattctgctgatgaccatttttatactttatggcaaagcctcattgcctcagtttcctgtctggaaaatgagttcatcatctacctcttgggcaattgagagttttcattttgtgtcttttaaacatctggaaaatggaaaacactgagggctaaggataatgatattgtttaatgtaatttgtcatcagaccggcctcctgctcactatttctttttttttagatgctgtttttttagaatattaaattaaaggagtgctgttaatatgtaatcttcaactagttccatggaggaaagtgatgttttatgaattagagcttaaattcctatctaatttctgaagactgcattcttttcaaagacttgaaattaaactcaggaggatacattttgtttgttctagggggaaacgtaatagaatggtatgagatgaattctatccttttacaataattattactataatattgaagtattctatgcctttctgaaacactttattcagaaaagatcattttttggcttccttttaaaaataagcttgaagtagggaagcatttgcttcttagattttaaatgtagtcttattatgctgaggaaaatctttagttgaaagaataattcattacagatttttgatgaagggaagaaattaattatgttgctggaagactgtctacaaataatcaaaatatttaaatgtaatgtattcaagttgttattaaaaagttactgaatgttatctgaagatgtgaaatgtgtagtcaagtaaaaagttggcgtatactttcttgggctgcatatccaatttaattaaaaaattaaatctcagtttccttctaaattttgatagaactatattaaaagcttgtatacacagcattctaggaaatttctcttaactatcttttttttgttttttttgttttttttttttttttttgagaaagagtcttgctctcttgcccagtgcagtggtgccatcttggctcactgcaacctccacctccgggttcaagcaattctcctgcttcagcctcctgagtagctaggattacaggcatgcctacctaatatttacatttttagtagaaaccaggtttcaccatgttggccaggctgggcctcagcctcccaaagtgccaggattacaggtatgagccaccatagccggcctcttgtatcctttttgtccaatttcaaataatgtgtgaatcttgcctaactgctgttgcccacgttgaagctaaagagtaaaaacctattcatgaacaaagaaggcaggtgagacccggtaacaaactgtctctcttcccactttctctttcttattaatttggcaggatctcccttcccattttgtcaacatggttgaatttgtgtgttggggttgttagggcatgggaattcctggtttgctttctctattgcatgcttgttcatgttaactctttggggagcagaatgagatacatatgcatccatggttatgatggaaaaaagcatgcaaaatccatttttagagagagagagaaagagaaaggtgggggtgggggagcacaaagatcagaagagtactatgctgatattcaagatatagtacagatagctttctgtgtacctatccatctacctattcatctgggctattgattgactcccacagcagtaaagaataattacgcagttattcttctggttatgttttaatttcaaaaagttaagtgtgattttcctttttgctgggatttctgtcttgagcaaataattattcttatgaaagtatcaattgcagttactggttaaaaatgtaagacctaggaaatttaagtgttgtttctattttaaggtatatacataatttataaccatttacttctagagaaaatcctgaatggttagtaatatcaaaacattttcaacaagaaaactaaaatgaaaagaaagtttaaaaattacatgtgttacagctcttttagaatttgtctagcaggttttctggtgaaaattaaactcaagattttcaccagaaaacgttttaaaacttctaaactcttaaacaaattataaatacttgatactttgaagaactgcaaaacaaaatgtttttaagttttcataaggcaaaatcattgagttttccagctttgattttccaataaaaggatgtataaatatttggtggtagtttttcacactcaattccaagagaaatttactgtaggaatctgtacatttgaatctctgaatattctatgatatttaaaatatttgaacaagatgcagaaaattttttagctatattaatcaataatggtaacctctatcactcataatcaagacacatacttaaaatagatgactacaagacccttctaactgctttgctcaaatttaaatttcctcaagtagttcatagaccctttacaacctggcctcccctctctggcctcggtttgatcccctcctattacccccaacccctagtaaagtgacatttaacttcagggttttaacatatcatgctcttctctccagccctttcttcctataactctcttactatcttcaccaccctatcttcatgtgacttaactcttgcttatgttccagttctgctgagacacaacttcccctgggaagcctcctgacccatcaagtccagagtagatggtcctgccatgtgcactgtcagcacctgcactgcccagccacgcccctgaatatacacaaaggaatcgcaggtttgagcatcagtctcctctggctaggctgtaagaaccttatcagcaggattcatgacagccctgttgtcattgtattgccagtacctaagacacagtcacactcagtaaactcttttgaattgaattgttgccaaaggtaaacaaagataaacctagcttgtttttctcccctttttagagggaggagaggggaaatgtaaaaagacaaagatgattctcccttcttatagacaggagtcaatccgaatcaggccctaacaatgaagcactcatgaaaatctctcacctcatctgcaaaacttgtgtgagaaccctccagaccctctgggctagaccctgattgaaaatttgaatttaaaaatagatgctggctccacggactaaaataatagtaaggaggaaagaggaaaggtccaggattgttgttcctggatcaatattgttccaacattttaaagtgttccaacattttaaaacatatgtacttaggcataaatcatcatccggtatgaggaactggatgcctccactctctatgactaaatccaaactgtcaaaaccagaatttatgtacttctttagaacactacgtaaatgatcaatatttaattgtagctggggctcagtagtctgggctgtgaacagatcttatttgaaaccagtatttcatacaaacttgtaaatataaagaaagccaaatccaagaacttaagagtatttgaattccaaatgaagaaaggaaagaatatcttattttgttctgctttatgtttgtctttattcatgaccatttcttactaaaaatcaccatctgaagcttttgaaactcctgttgtatgcacagcattttaagtgcagccatgaaataagttagttgaaacaaaataaaatatctccttccagtatgctctgatattgtgtcaatgtaaatgccaaggcatgacagactgttttccatttataataagcggaatcttgagttgcattggaaagctaaaagatttgcgttgacttaaatgaaagtgtcctttttaaagcaaaaacaattcattttctctgtgcttatcacaggagatgagatttgaatgttatcagttgtgcatgaattcaacctcaaaaacaggaagcacacagctgtgattttggcctttttccatgaatctccacagcactgttccttttgatggtgagagtttgtataacatcatgaaccatctgagcatcagtgcaggttggaggcatgaccctcctcagggtgaacaagcctttgtgttgagagtttgagcatttggcctgctcactcttccttctgttcaacagcagtttcatttgtgtaacccaggacatggcaaatcggattcattggatcctcctttttgtaccacaaaattaacttcctatcttccttaaagagcaagagtgcagaaataattgtatagacaagaatgtgtgtgtattcccaattagcacaataaaaactgggtgaaatcaaaatatattttaaccataggagtagatgaaaaaaatagatcaaatccaatttttctttaaaccagaacaataatagttacataacatgaagttttctatctgtattctcatggctgcttgccgtggctctttttccatttagaatgcatgtaaacatcaatacttgtaaaatagcagctccagaactaggtaataaaatgaaatccttttcctttgtcccattcaacaacagttctttttacaagaactttattgattcaagcatctacaaaatggtatttttatcttatgtatgcattttaaaaaaacatgcaataaaatcttttgagtataaaaaaatcagtgaaatataaagggacctactttatccatggcaaattgtctccaacgcatattatgctaatgatggcagacagccacctcgctttgtaataagtattatgcacacccacacacaaacaagctgttggaaaacagagtcagctggaaatgcagacaaggtaggaaaccacttacttggcagggtcagaaaggggaatatgcccatttgctccagaaccgctcctctagcagctgctgccgtgccaaccctgcagggtcagcctttgattcaagtgaatgcagctccagaaggtgccttttaaaatgcatttttattcatttctattactcttacaagagtaacagtatttcttatcacattctggtctgggttagtagattaaataagaatgcttccccacccaaagaacataatttctggtgagaaaatggggtctatggaaagctgaaagatttgtatgctatgttccacttaggggtggtgactggggatatgtaaaactggaagggataaactggctacgcaacacggtgaggacgctgagtgtcagctttggctttcagcttctctgtctgtgtgaatttcctgtggattctggaaacgtttttagggaactccccgagaagttagagaccacaataaaatgtttctacatgacaatttttgttacccagtaagaggactctaccgggttcagtagtgtcaaggtggaccctaaatccatttcctggtgtctttaaagggaggccatggcagacacagagacacagaggagacacacagggaggaggcagtacatgacacgtgacaacagaggcagagattggagtaatgcagctgctataagccaaggtgcaccagagattgcaatcgctggaagctaaaagaagtgaggaaatatatttccctaaagcccttggacagagaatgcttgttttggcttagactttggacttttggatttctagccttctgaacgatgaaagaatacatttctgttgttttaagccaccctctttgtggtgctttgttatggcagccctaggaagctactacaatgaccatgttttagaagaaccaatacaagtctctggtaataaaattcccagagaccattgctagacaccagccagcctttcaaaccagcactcctggggtgtgctagaatacctcagcttccttgctgatttgaagggatcaccctagtacatttcagtccatcagtaacttttcatcttctatgtgaacatcaccccctaagtgcactatggtgcaaagagttctagaggaagctgaaattattcacaacaggggtcgagggagggggaaggaaagttgtctttagacatataaccaaagtaagaatatatacaatataaggaaggagaatagagaagttcaaaaaatgggattactaacagtcaaaaattaggaaatacatgacctaaacagcactatcaatctacttcatctaattgacacatagaatattccatccaacaacagcaaaatgcacattcttctcatgctcacgtggagcattttccaagatagaccacattcttggccatatatcatccattaaaaatttaaaagaatagtaattatacaaaagcaggttttcagaccacaatggaatgaaacaagaaattaataacaaagctcaaaaatccagaaatacctgtagattaaacagcacacttctaaataacatgtagatcaaaaaaatctcaataaggatttttagatattttgaaaaatatgaaattaccaatataacttatcaaaatctgtgggatgtagaaaaatagtgtgtagaggaaaatgtatagcattaaatgcatatattagaaagaaaaaaatctaaaatcatcctaagctgtcaccttaggaaactagagaaagaaaagtggtttaagcctatagcaagcagaataaaagaaaacttaaaaacgagagtgtaaatcaatgacatttaaaacaggaaaataatagagaaaatcaatgagaccaaaagcttgttctctgagcagatcaataaaattgatatacttctagccaggataaccaaaagagagaagacacaaattactaataatagaaatgaaagaaactctaagctcacaaatttgataactgaaatgaactagatcaattccttgaaagacaaactaccaaaactcacacaagcagaaatagaaaacctgaaaagccctttatctgttagagatattgaaccaataattaacaactttccaaaaaaagaaaacacaaggcccagatgatttcactggtaaattaccaaacatttaaagggaaaaaaatagccattctccacagtctcttccagaaaatagaagcagagagaactctttttaaacttattctcttgggtcagaattatgctaatagtaaaaccaggtaaaggtattacaagaaatgaaaactaaaaaccaatatctctcatgaatataattacaaaaatcctcaacacaacactaataagttaaatctaacaatggataaaaagaatcccacacaagacgtgggatttgttctaggtatatacggctctttcaaaattcacaaatcaatcagtgaatccaccacatccacaggcaaaagaagaaaaataatgtaattatgtcaattgatgcagaaataacatttgacaaaaatctaatgtgtattcatgataatttttaaaaactgtcagaaaactagtaacagaggaaacttcctcagcttgataaagaacatttataaaaacctgtaactaacatcatacttaaggacatcctctcttaccactcttattcaatgttgactggaaacactaactagtgaatatgacaagaaaacataaaagttactaagattttaaaagaaagaaaactaatttgatttacagatatcatgactttctacctagaaaatcccaaagaatctacaaaaaactcttggaactaatcagagtatagcaaaatcaccaaagcagaagatctgcaacaactgcactcaagaaaaagttgggagctgtcagtgcagtgatcaggcatctccagagaccatggcaaaggcaggctgtaagaaattgccccttttccatatgttggttgcagacattatggaaacctgaaatctagttgcgacatgtcacacttgctttttcttgcaccttcctctgatattttggtggggggtggggggtggggggcagatttgggagaggtaaattacttggagaagatgatgctcaacagaatgagggaatacttgatgtgaaacataaatcaaatttgatcattaactaccattgtcgttatcaacagatcaagagagaaaaaatagaaggaaattgtaattacaggattgctgagctgggctttctccaataataacatgatcaaaataaaataaaagaagtccttttggcctctgacatcacatcctggagtggatgatttaccagttggtcatctgctgtgctgcaggaatgaatgtagctactgtgggtatgtacttttctatcagcaaggatgggccctggctgctagtattatttctaagatttcttcttagaaacctaagctaaaatatgccaaccactgtattacacctttaaaagtagtatttcataaagtcatattttagtttgttaattaattaaatgataaaatacaaacggctattttggcacttttagttaactggaaacttttcaatgcaactaattgttttgtattgtctaaatgttaagtataattattttcttcatttacattaaacattttcttgagagtaatttttggtcttatatgtcaatattctaaattattatggcattgtactttattacttaaaagaaaactaactgatgtaccacaaaagccaagtattaaacttgtattttatcgaaggccttgtaaatatagtagtataaacagtagagcactgtaaagaccccatccaggacttataaatggatatacaaagtacctattataggttttgttcaaacctatgtcaatacattgtataattgcacaaatactgatttactttgagaacccaaaatggattatgaacaccatgaaagatggcccaggtttaacaggatgttcctggacaagtcaggagcacagtctaaggtacaggggctggtcctcagttgcagctgacttttttttttttttttttttttttttttgacgaagtctcactcttgtcgcccaggctggagtgcagtggcgtgatcttggctcactgaaacctctgcctcccgggttcaagcgattcttctgcctcagcctcctgagtagctggcacaggtgcacaccaccatgctggctaatttttgtgcttttaatagagatggtgtttctccatgttggccaggctggtcccaaactcttgacctcaggtgatccgcctgcctcagcctcccaaaatgctggcgtgagccactgtgcctggccacagctgactttttcttggcacatgagtttcattcctctgtgctctgactctaatccattgtaggcaaaaattaaatcagttagcggaatgataccatctcgtagagaatctcagaattagaaaagcctataccatttctttaaatataagaaattgttggttaacttaatcaaaattatatagcagagtgtgttacatgccataaggatcattgtgaatgaatacaaactatttcaagagatttgaatctttgctatacgtgtgtgtgtgtgtgtgtgtgtgtgtgtttttctctgtatgagttcttgtatgaattcagtaatacataaaatgcccaggtgatatatgatgtgatcaggttagaaaaacacctcatgctaatggcgccagtgccattagcaacttatggcctagatttgatgaagaaataagcttctctcattttaacagtggtatcatacagagagttacttatatgcatgctctggataaaagactcagcacaattccagttttaaaatagataattaaaaatctgtatatgtcaaacaagatttccagatagctgttggaaggggggaaaacattgttaagataggtgtacacatatagcaacctcagatataaattcatttaaattcttcattgatagcaaaccaaaaagaattatttctaaatagaactttgaagttactttaattttaatgtaataacaacgtcataacatcataaatcttagttgagaagcagctgttggttttttcaatccattagttatggtatttcaagcttccataaaagtactgaatctagatctttaaagatgaatttttctagctcatatcttaaggttactaaagcatacatgattactgcgggaacaaatgttttgtgtgtttatttcttttttattgctaatggtttatatgctaataataaaatgtatattaagtctactaaatacctggaaacaacagaatttgcttgcctgtttcttagctttactgggaattccttaaagtataatttgacattaagttcctctaaaggtaataaatttaatctgattatctcattcaaacttttgcagatagaggatgcttattcttatataactattgactcaaaatgcacttaataaatgaaatttctccaactcagagaaaaaataatcatggtggttaatatttaaccaccattaacgtacaccaattaaacatcccattgcagagtagtggtttgttttatggaaggatagtaatcaaagcaagttaagacagttttctgcagtcaaatgtactggcttctcattgtgctatattccttttcatatgtggacacatggagaaatatttctttttccaccaatctgaaactttgcaggttggctcaaacagactccatatacagtgcaaagattacatggttattttaataacattaacagacatatttgaaatcagagtataattgatatttaaattatatgacactggctgtacatgttactgaaaataaattacaatcttcacttttgttttaaatttctaatgatggatatgcctttatatgtctgatataaacatttccatttagagataacatagatgagataaacggccctccattgatgttgccctgagaaacatagggccatctgaatcctttttaattgggtaaatgtaggctttttgttgaggttatcatgtacctttatgcaagtaaattgaaatcctaaatattgctcattaaaatagtggaacactaattttataaaatgtcatgcttttgagcccattctcaatcttgtattcatagagaagggagcacttgttttaaagaattggagtattctgtattactcctcttaaaatgttactatttggaggagctaaagaccaaaattcttttttttttttcaggagggattttttttttaattattatactttaagttctagggtacatgttcacaacatgcaggtttgttacatgtgtatacatgtgccatgctgctgtgctgcacccattaactcgtcatttacattaggtatatctcctaatgctatccctccccactccccccaccccacaacaggccccggtgtgtgatgttccccttcctgtgtccaagtgttctcattgttcaattcccacctatgagtgagaacatgcggtgtttggttttttgtccttgcgatagtttgctgagaatgatggtttccagcttcatccatgtccctacaaaggacatgaactcatcattttttatggctgcatagtattccatgttgtatatgtgccacattttcttaatccagtctatcattgatggacatttgggctggttccaagtctttgctattgtgaatagtgccacaataaacatacgtgtgcatgtgtctttatagcagcatgatttatagtcctttgggtatatacccagtaatgggatggctgggtcaaatggtatttctagttctagatccttgaggaatcaccacagtcttccacaatggttgaactagtttacagtcccaccaacagtgtaaaagtgttcctatttctccacatcctctccagcacctgttgtttcctaactttttaatgattgccattctaactggtgtgagatggtatctcattgtggttttgatttgcatttctctgatggccagtgatgatgagcattttttcatgtgtaaaaacctaaattctaatcctagctttgctacagaagaactctgaggatttaggccactaaaatctttgaccctcatgttccttgcctgtgaattatggtgcaaaatagaccatttctaaatgtgcgtctagctctcactgatctctaaggggtattaaacacacagtgtgttcttgattttctcattggaacaggcaggtgatattgccaagcacttggtgtttggggccaaatgatcaagagaacagtcaaggtttagaacaaaatttaaaggaaatttcctgggaagcagaagacagataaggtaataattttgtttgctcagaatagtgtactttttggcagtcataacaaattctatttattcaataaagaaaaaatataaatatatatatgattgtaggacttcaaatatggttcactaaaaacttggtatacccaaacaaataatcaggctcttattcacccccaaaagtcccaggcttaaagccctttcatgcagttgtggctttgttgagtgatgaaataactgggaatatagctagttgatgaaaaatttattcctatgttagaaaaaagaaagtcagcatagatcttgtcattctctagacaaatgcaaacctagtttaacatttgttttgtgtccagtgagtattataaaaatgcatagtggtataatagaacatagaaaataaaaagtcactttgacatctttaacatgtggaaccttgaggaacttcatagatagatacccttataagactgtagcactctaaaaagggctatcaaaatgtccacgcacatggtacctgctttaatgaagagctcagtaccagtttcaggcaatttaaaaatcttagcctttattatatagacattaagtcaaattatttttctattatgatcccttttgaaataagctttaacacatttctaatgctttcttcagaacagctcatatgaattaataactttttaaaaaaattctttcatttcaatttaatctgaaaactttagatctcattctcagggaaaaattactttattgcatgtaaagtaattacaaatagaatatagttcacaattttcttccaaattaagcttgagcctcaataaaaatatttttaaatgcccaacaatattcagttattatttgccatgtttctgttttcatgggaagatataatatgtttaataaaaatacatatctaaaaggagaatccgatttgtaaaattataaattctagttttcagtcaaaaccaccctgagcgtgaacttatcagaatcttgtctgagtaactacaacccctcccccaaccttaaaaaaacacaccacagccccactctccaccggtgtggccaaaccaagggaaatgagaagcaggaatgtagctcacaggtcagagccaaatacgaagagtaaaaatagtaccttgagctttcagaaccacagattttcaaagtgagccagagggcagagcagcagctacattttcaaacagaagtaactacatctttctaatcaactgccgtgttatggaacataaactgcaggaaatgatggcttaatgtccttttatgtatcagataagcaggaggaagtatcagtggtgtgctttacttagtgagagaagcttaataaatatatttatttatttatgtcctttaatgcagtagaatgcttttcaaaaaccattcaacttgtgtgtacactgaccagaaaatgttctatataaaaaactgtattttgcttaggttttgagatgaatgtttcatgagatatctgtatatgtattaaaattatttaaatatgaggaaaatgtggtatttgtggtgtatttctctaaagcaggatttttcaaccttgatacaaggttgacatttgggactagataattctgtgtgtttggggggttgtcctatacactgtaggatgtttagcagcatttatgggttctacccactagatgtcattagcacctccaccctcagatgtaacaaccatgatgtctccaaatattgtcaaatatcccctggcagaaaatcatccctggttgagaaccactatttaaggaaacaagatagcataagcttggtcaagattacacactggtgttttgtcagtacaattcagaaaataaaatccagcaaataatgtgctcttcacaaagctattttactgtttcttaattattgaaactttttcttatttttgttcttcttaaatggattagttatcctgggtagattactaaatagttttaagtagttgaataaatttgttatgagagctaaaattcctgacataccactgccctgacatatcagcaaaatgataatgatgatgttcaattaaatgtatcaaataaaagcctgcaaaattcaacagactgaagtctatattctggaatttgacagcaaaaaaagttgtgtaggttatcattttttggcaaaaaggcccctaagtacacttgcaatcaatggctacatgcgtagttccaaatgtcgtctttattacttctgtttaaatctgtctctagaatagtctccaagaatgtagcttttttactttggaaactcttactcagacagatccccagtaaagcttggtaatttagtagcttaagaacaagttcctccttctgtctgcccttctttctcccttatatgtgaggaaagtggaatttcacaagatgactctattcaagagtcttgataaaagtcgcctttacaaatgcttttacactgttttggggagtgtaaattagttcaacaattgtggaagacagtgtggtgattcctcaaagatctagaaccagaaataccgtttgacccagcaatcccattactgggtatatacccaaaagaatataaatcattctgttataaagatacatgcccatgtatgttcattgcagcactatttacaatagcaaaaacatgaaatcaacccaaacacccatcaatgatagactggataaagaaaatgtggtacatatacaccatggaatgctatgcagccataaaaaggaatgagatcatgtcctttgcagggacatggatggaactagaagccattatcttcaggaaactaacacaggaacagaaaaccaaacaccacatgttctcacttataagtggtagttaaacaatgagaacagatggacacagggaggggaactacacaccttggggcctgttgagggttgggggagggagagcatcaggatgaatagctaatgcatgtggggaataatacttaggtgatgggttaataggtgcagcaaaccaccatggcacatgtttacctatgtaacaaacctgcacatcctgcacatgtatcctggaacttaaaataaaattttaaaaagtcacctttatgggttttgtttttgtttttacttttgcttttggtttttcagtcaggggaattattgatcattgctagacattaggaggtggtaagaatgcagtaaaaagaaatttgacattgtttagaaagacttctgaaaacgaacacattgaaaatattgcatatgtgggccaggtgcggtggctcacgcctgtaatcccagcactttgggagactgaagggagtggatcacctaaggtcaggagtttgggaccagcctggccaacatagtgaaatctcgtctctactaaaaatacaaaaattaggcaggcatggtggcggatgcctgtaatcccagctactcaggaggctgaggcaggagaatcacttgaatctgggaggaacaggttgcagtgagtggagattgtgccactgcactccagcctaggcaacagaatgagactccattgaaagaagggagggagggagggagggaggaaggaaggaaggaagggaggagggagagagaaatagaaaagagataaagaaaaagagaacgaaaatattacacatgtgtatcttagcaacttcaaatttccttttccttttagtatgaagcaaaattctaacgttcctagaaagtgttagacctgtcaacctccaggaaggatgagatctgcttccacactgcacagtgtccagaagatcaggaccatgtgtcacttggttcaaagatgacttctaagtggtacctggagatactgaagtaggtcatgtggttttgtctttattttcagaagaatatattgtgtttcataactctatgtttttctatattatccacagaaaaagagcatgagtctttctgattctaggaagtacttctgtcctaaaccaacagtagtttcagctaaattcttatatttgaggccatgttctcaggtatacaacacataaatgaatgaaatatttattcacaagacaatatgcacccttttctcttaaagaaataaacatgtggcacatttcagacagaagctaaacacaaaagtttttgcccaaaaatacaacacaggaaacaaaagtactagaagtatgaaaaagtactagcaagaaccagttgtccacttaggtaaaggggcaggaactaaaactcttttgtggaggttatcctgtttctaagtataaatactcatatgtggaagtatccataacccatgtgaatattacatattttgttgtcctttctacttttagagctattactgtaaaattataagtacattagaaatctaatgtgcagatataaccttaatgagtaacccaaagttctcattccttatttctcttaggtgcagattttaatctcatcctagaaagctagaatatgaaaaccaatgatttactcagggaatgagcctggtctaccacccaggagccacgtttaaagttattgttttatttccctcattctcttcttattgtagaatactccctaattatcccaaagtacttattttattatggtaaaaaatgggtcagaatacatacctattagaatggctaaaatccaaagcactgacaaagccaaatgctagtgaggatgtgaagcaccaggaactctcactcactgttggtgggaacgcaaaacggcagagccactttggaagacagttcggcagtttcttacaaaactgaacatactcttgtcatacaatccaggaattagtttccttggcatttacccaaatgagctgaaaacttgtgtccacacaaaacctgcatgcagatgtttatagcagctttattcataatggcgaaaacttggaagcaaacaagatgtcctttaataggtgaatggataaacaaactgagatacatacatacagtagaatcttaggcaataagaagtacacgactaaggcatggaaagacactaaggaatcttaaatgcatattgctaagtgaaagaagttaatctgaaaaggctacatactgtatgactccaactatatggtattctgaaaaagaaaacagtacagagacaataagaaaccagtgattgccaggctttagggagagaaggaagaagatgaagaacaagtggagcacagaggatgtttagggcattgaaactactgtgtatgatactgcaatggtggatacatgtcattaaacatcaatcgaaacccacagaatgtccaaacaacagtgaaccctaatgtatattatgaactttagtaataatgcatcaatattggctcatcatttattacaaaggccagcttctggatgccaggacttacttttatctttttcaaagcttactgttttttaaacttacatatactcttacaacagttgttactcaactaacctctaatgaatgtagtctctgatgggttaacaatacagttgcctctccctactcacatgttctgcatccatgaattcaacaaaatgcatatcacaaatactgaaaaaagaaaaaccccaaaataaaaaaaatacaaataaaaaatacaacataactatttacatagcacttacattgtattaggtattataaggaatctagagatgatttaaagcatatgtgaagatctgcatagtttaaatgcaaatactatgctattttatataagcgacttgagcatccacatattttgatatccgctgggggttagggggtcctggagccaatcccacaaggatactgaaggacgactatactgcaagtgtccccaaatcacaatctatcagcagagatggagggagacaaagattcacattacagatgataagtgttccttcattttgacaaagaatttgccaaaggtgaaactgttgctaaagcttcctcattttaaatggaagagtacacattaacacttagatccaaagtgaaggcctagagatgagcagttttttgctgctgagatatggtaataagcaattaggaagtcctgtcctctccagcctgctccactctcatttccttaaaatatgattcagggattctgagaaagttggtcaccaaaagctcaaattgtcatcatatttatctgataaagttgttcatgtccttaagatatatgttatggagcatatcattagtttgctagcactgccataaaaatgtactacagactgggcaacttaaacttactgaaatttattttctcacagtcctgaagacttgaagttcgaagattaaagtgccaacagagctcatttcttctgaggcttctctccttcacttccatcttcctcctgtctccacatggcctttcctctgttcctgttttgtcttaatctcttgttctttttttttttctttatttttggagatagaatctcactctgtcacccaggctggagtgcagtgttgtgatcatggctcactgcagcctcaatctcccaggttcaagtgatcctcccacctcagcctcctgagtagctgggtctacaggtgaacgccaccatgcccaggattttttgtttttgtttttcttttttaagacagacaagatcttgctatgttgcccagcctggtgttgaactcctgggctccagcgatctgcccacctccatctctcaaagtgttgggattacaggcatgagctactgttcctggtcctatctcttgttgttataaggacaccagtcgtattgggttagggcccaccctaatgagctcattttaacttaatcatctctttaaagacctaatctcaaaacactgtcacagtgtgaggcactaggagttagaatttcaacatatgaattttggagggttcacattttagcccataccaaggagctactatgtgtcgatcgttgttctagtcagtgctgcaaaaaggcaatgggctgggcaaaatcaaaacaggaccaaaaagccaggagtggaggataatagattcagtcagtatcttgggtgatgtagggctcccaagactagctgaagatttaaatcagagaaattatgtgaaatttttatcatggagtgcttattgggctttgaggtggacttggattggaggcagaaatgaacggttaagaggctaaatccaatagaataagtgagaaataaggacctggaaacggtagtagcaataaacaagtttacaaagattcaagctatttttaggtggtagaattaaaagaatttattgacatctcagaggcaggtaataaggagaaggaagcattaagaaaaattcccagagttctcacttaggtgattgaatagattgtgatgttattaactcagatggaaaaatccaggagaaggacagatttataaggagtctaatctgggtgttttaagtctgagattctcttggagatagccagtaagagtgaaatgtaagtctggaacatgcgagcgatgaatagggcagagataatcatcttgaagtgatcagaatgtagttgaagccttgaaaggagatgagctaaccccgggaaaacacaagagtaagaagaggtagaacctgatgaagaccaacaggaggagaactgctcatgaataagtcagaactgtatgagtccagagaggctggtgccatggaattcaagtttggagagagcttctagaaagatgaagtataaaagttagtaggtgaactggtgaaagtgatgggatgtagaaaaaatgtatcttgggtgattcttcctggctgttttatcaaaaagccaaggccaaaggaagacatagcctgagaaatagttcaagtttagtgctatgaactcattgacttttcagtcactcaacacaaatagttgtcctttaagtgaatttatttgaagagtttcctaacacatcacttactattatgcattatgaaaatacaatttttaagtatccactggattaataagtgacaaccaaaaatgttgcaaaaaaaaaaaaaaaactctgcctattggatttggaaataagaaaggcagtggaaaacacaatatgaatagtgcaagaacaatgagaaaagaagctgaaagagggttcagaaagaataggtgtctcagtctattcaggctgctgtagcaacttaccttaccctaggtaatttataaacaatagaaatttattgcttacatttctggaggctgggaagttcaagatcaagccaccaacagattgtatatctaacaagggcacttttctcatagaaaaggccttcttgctatgacctcacatagcagaagagaaaaaggagctctttcaagcctctttcataagggtacaaatcccattcatgagggcaaaaccctcataacctaatcacttgccaaaggccccatctcttaaaaccatcacctttggggttagatttcaacatgaattttggaaggaaacaaacatttagaccataacaataagaaataaagaaattaatacagcaataagctcagttataattaaatgggaaaacaatgtatcaagtagagtggctggtaaggggaagaagcttctagataggagaagttaaacatattatatggaatagtgtgtgtcttggaagaaacaagagtagaaggatcctgaatattggtctagccttgaagagtaatagacccattttcccctgacactggaggaagacagataagcatatgtatatggttatagagtaaatgtttacgctctactcatgataatactgatgaaaagagatgtatctttaacttctctgttgatgttagaagagaagcaactccacagaagaaagacctgaagagggcaagacccaaagtatggtcacagaggtaaggtgctgaagtgggaaagaagaaatgaatgccatttcagacctgccaggcaggaactgtgtggctaaaggtgtagaaagggctattcaaataacaacaataaccagcaatagcttccacattgagcatttgttataaaatgtgctatgaaaaaaaatactagtatgtaaaactatttgtaaaaataaaaaatcaaataagaacttacaaaatctagttaatgaaaaccaaaacaacagtaaaggagaatattcactacgaagaagtgagtattcccattttacaaggaagaaatgaagcttcaatgattaatccagggtcattttgctaataactggtgcatctgggatttgatccaaagtcggtctgatttagaaactgtgctatccatcattttcctctagtgtggttacacatggatgtgggagtccctcagggtgttggcaaggcttacactaggggttctgatgctgatgtcttcaggaaatgttgagaaggcctttgaagaaaacaccctgaaagcctggagaagataggtagaaagtggtagctaaagaatctttagcttcaaaggaagaatagactttgtttagaaataaaaaagtaaacttctggaggtgataatggaagctggagaaaaatcagcacttggctgtgtgggcactgagtagtttcctttactttaaaaaaacaaagattaacctttgttttttgagactgtagagctttgagggccatttttagatttttgtcccacagagactgtttcagttttggaaaatccatccctgagcttgtcagacgcattgaaatataccaatctcaagtgcagttgactagttgacatatcttcttttgtaggtatttgataaatatccattattttcattgttgcagatttctttttgtatttcaaagcaaaacttatttttcagctcccaaacatgtttttggccctgaaagagcccttaatccctgtccccaggtgccgtgtctgcagtggttactggaaaaaatgagcctggttgcctcccttcagcatgtgtaaagcttgatatttgacagcagtatcacctccaatgagcatttgctggtggttagatctaatcaggtttatagattcctgccacaggccttcagaagtccaacttatttcttttttaagattccagtatttcttgggctttgctttaatccacatataagtgtcatgtcaccttctgagggccttcagggaaggacgtgacatgtgctttattccatgagctcacttttggacttctcaaagatttcttagaaaatactatcttgtatattttatcaggtagtcagagataattgagcaaatcaatactaccaagcacagaaattattttcttagtgtcatgcctggcagcagcaaacaaacaaaatgcctaccatgtgtcagattctcatggtcctggacactgtcacgttcattctgtcatttaatattcctaataactctttgaagtcgagataataatctccaatttgcaactgacaaatctgagacagagattcaagtgagttgcctaaacccaggtagaataggagagaaattccaagtgcccctaacagcagtgctactgagacattcaagactttaatttttttatctttcttactttggtaaaaatatcttacgtgtctgaaataatctttttgtattcgatgtggtgttaaatgcatctgtgactattcgtacacttgtaaatagttgtggaaacctaatttgatcttgcttctaaagaaattataactggatgtagaaaaaaatgggacaataagtcttttaaattgtaagcaacaatttcttgcctcccacattcccagtgtagctttttccgcctctataactcaaagaacacgactgtcttccattagaataaattgtttttgtcagcacgcttttccctgtgcacttcttgaatttgcttttctatttccttgtttaaaaatagctccatgatgagcctatatttcagctttgatatattttatgagtggaaaggaaattacagatattatatcacttaatattactgtgttaacaaaaatgtaaactcttagagggcaggtatttttgtgtgttgtgtgcattgctatgatctctgtgcctaaactgtgtttaatacaataaaagaacacacaaaaaaatttaatcagtcataagatacattagttttactctcttctagtatccttgcattggccttcaaaactgtacccatttctcgaataactcccagtaagtccttcctttgtaaatggtcctatataaggtaaacaaagtctgactatgtagttggagttactgcctgagttttacatatatcctagacttggtctcagtcacagattaatgagcattcactaagagttgatgtagaccatgatctctaagagcacaataattctaactgtcttttcttggtcagctctgcctagccatcactagcacaatgcccagcacaaagtcaccactcagtagatatttgtcaaatcaataaataatgacagaatccaaaatcgtaataatttatcccagtgctcagcactgactatatgtttaataaatatttattgaatttcattgaatattgtgcttaaagagagaatcatgccatgcattccaaattaagtaggcattacatttgaattatcagctgtttgggattatctgtgtggctcctccccactgttagggtggtaaattgagatcttactccatcagcaaactccccaaatctgcctagtatttggtttccacaagactagtttactaattctaacgatggcatatttaattttaaaactaatgcataccatgatatcatatactgtccattactattccaataataagaactctttttcagagcagcatattagttatttactaactggtcccttctttccttttctttcttcttttttcttttgttcattcatttttttcttttcttaattctgaatgtcacataaacatataaaggcctaaaggcaaggatcttgacaatattgcaaggtgtattagggttctctagagggacagaactaatatgtatatagggaagaatatatacatacatatatatatttatataaagggaagtttgttaagtattaattcacacaatcacaaggtcccacaatatgctgtctgcaagctgaggagcaaggagagacagtccaagccccaaaactgaagaacttggagtccgatgttcgagggcaggaagcatccagctcgggagaaagatgtaggctggcaggcagggtctagaaaagtctaagaacagtgactagacaatcagcttaagaggacagacacttgactttatgtttataacatatggtccatcttcttggctcttgagttacctgaattgcatcatgtcaagatgacgcaggcttccagattatagtcacttcttccctctagttcccgtaagaattaaaatgatttgactttagttccaacaaacataacgtaacattaatgtgcttcacattaggtcaaatgagtctaaaaatacacacacgcacactacatacccacacacaaatatgcacaaacgtatcttaaatagatagccaattggtgaacactccaaaacagaaagatcatacatttctagtgtttctttgccttatgactggcagattctttgtaacacaaatctctcagtgggaataattttcaaagtatataatatgaaaccagttgtttctgaataaagcaatcaaatagaattatagcagatgccatctatgggggtggaaatggtgccaccaatacagataccaccacttaagtaaaggagaaaaatgtttaaataagtacatggcgtcatcttgttaacataactatactacattagttgtcagtaaatttaaactgttaaacattaacatattaatcactatataaataaatacaagatatgaaatactcaagaaattgaaaagtttaatgcatggccaaattcttccataacagggaatatttttattacagacataaagaaatttaacttaaattaaaaattttagtctcttttattgataaaagtctctttccattatcaacaagacaattttcctccctctaagtagagtttcacaaatctctcagctgagtcattataaagatcttttggtgtgctcttttttatttgaaatatctcttgcttgaaattaaattcagtcctaaaatagcaactatatcacctcctatccacttcccattagtaacagcaaactccagagattagcagaacagcattcatgtgtctggaaaaggaaccttatggatgatttaagcataagacctggctacttactaaggagcagtacacacatatttgtaaatattaatgccagacaaaaatgaaatctgacaaaggtgaaatcattgtactgtacagactaacctaagcagagttccaattttgcctttcaacattatatcttgcagggttgtataagcaataagctcattaacatcagtgtaactgtccccgaaatacaagtggattctggagaatgtaggtagtacaaatgagctctcttcaacgttaaggtttatagcaactgattcttcagagaacatgaagccttatgcttgagataaatttcctcatctgctgtcatgattgacaggtccatttggtttgttttatgggggaagggaacaggactggggcctgactcagggcacagtcctcaggtttggggctcttttgtatgactgcccacaagtgctatctactgtcacacctctttaaacctgcattttcggattttaacatcagcaaccaatgctcttctctgagcctcaacacagttattctttaaatacagttctatttccttggtgaagtctcctttgaggtactaaatttagcactgtcaatcagaagaacaggtggtatgtgacactaccaaataggtcctctcccatcatgctttcctaagacagccaatcacccagggccctgcctaaggatgtggggctgtcagcagatctggtgaatataagggcaggccagaccctggctcttgagcagtcgtgcattcccagcctcgcctcgggtgtagggattgcatagaaaagcaaaactacacagtcttgactgtgtagttttgtttttaggattagaggctcaccgattcatgtcggagatggtcagaaaaaccaactctccataggacgtcgtttcagaagcaaccttgggcttagtcccaccctttttaggcactcttgagaaatcaggtgagcagcaacttttcttattttaatagtagagtcactttcttattgatctctggctctggattatttgtgtgtgctaaatgcctatgtacaagtgtttgtatgactatttcttgccagtgctgacccattatttaaatctgcttgttaaattctattttaaaatgtctgaacatttttccttaaaaagttgaaagctttattatatcagctaaatgattccatgattcaaattgtttaagttcacttaatattctaaaagttgaggtctgaaatgttgagagaaatgtttacttcttttctagactctctttgcctgttgagaatgttcaaggttatattactcaatgataaagttaagcacaccaagaatagctctgataaaatgcatgtggtatcagctacaccctgatgactttttaagggaatcaactgctgaggtatcagttgcaggacagtgacagaacacttgcctgctgtcagtcaaccttggagagtttaggagagtttattttaagagcatgacattttagacgcataccttcagccccagttagacaaaggcctgtgaagagcaagtgctaaggcaataaaatttacctagacaataggaatgtaagatcaatttaagctggttaattgcaacatagttggagatttggaataaaatgatataattgttttctaaaatattcagaatctcttcatgcattttaactcagcacacagtccaattatatattttgagataaatgttgacactaagaagggtaagaaataatgtttaaaggaaaggtttcttacttctaaatacactttgatttctcatcttcctagaatttgattactaattgtcaatgcctgtaaatacatagatatataattaggtattctatgtctaagaggacagctatttttagatatactaacttataaacagacaaagttagacacagaaagttgttcatcccaaagataatatgctacaaaaaggagtttctgacaaaaaaaatttatgaaagcttttggatattatctgatttttccaaatataaattttattgtctcagagaatgctggtttcatttttttaactaagtagaaggttacagtaaggaacagaattatcactaagaagattattgctccatgaagttttagtaaacaaagaatttaatgaaaaatagtaatgaagtgattgacaattcagaaatgttctatttcagaacagaatagtcatgttgaataattaggtatttatgcatcagaaaattcttcacataatgtctctgaaactgataggcaaagtactttcttgcacttaacaaaatgacttaactgcaaattttatattcgtttctttgatgttgaatattttactttatgaaagcataggccttttcacttcatctacattttacaccagccttccattattcaaagtttgcaaattgttccatattaagaactcaagccagcatttttctttcagaactataataaactttggcctgttcactaaaatttaaatttttctgaatatttacttcagcagtaacaacatttactgcacagttacagtatgaagaaatgttaagaaatagaaagcaccgtatgccgtctacaaaaagcttgcatatttgataaggcttgccaaagcttctccagtcaggaaagagattacaaagttcagatttttacttctggcaactattttaagtaatcagataatgtctgaatcaatgtcaactttataaatatagagtgaacgaaaaatattggggagaaggaaaatttttaaaataattttcacttactaagctgatgcagaggtttatttattttaatttttttttttttttttttttgagacagagtctcattctgtcacccaggctggagtgtggtggcaccatctttgctcactgcaacctccacctcctgggtttaagcaattctcatgcctcagcctcccaagtagctgggactacagacatgggccaccacgcctggctaatttttgtatttgtagtagagacaggggtttcaccatgttagccaaactggtctcaaactcctgacctcaagtaatcctcccgcctcggcctcctaaagtgctgggattaccagcatgagccaccacgccaggcccagaggtttattttacatttatcacatgtcttgtctctctaattacacttcactaaccctgcattgctgtggttttcttcttcaactctgaacctggttttccaccattggtaagactgtatattccctctttgaccactagggttcattccttgttctgtttggctaatacttttttccatttccccttacacttgctactttgggttaggctttaagtcaactcaatgatgaactatgcaaaactgttcaagccacaaaagagaagacctgcccatcactctaggcccacagatgacctatggagcaatccatttggagaaacgtgtgtctctgctatctgcaaagcagctccagagtgacccttagctgggacaccctaatttattttctcttctttttcagagtgcctagaaagatgacaactcaagcaccgacgtttacgcagccgttacaaagcgttgtggtactggagggtagtaccgcaacctttgaggctcacattagtggtaagctcacacattcacacttttgtttttttttcctttgcctcctctccagtaagttaacgttgctgcaggacttgacgccaagtttaagccctgctttcacttcggaaaattagtccaacactatggaaaggtcattttaagggtataccattcacagagtactgacaaaatctgacaatataatggcttgaaatgttttattcatatttattattccacaaagcaaaaataattagtgttggattaaaattgccgttagaatccagcaactaaataggaccaaatttagtcattctatatttgggctcagctgcagagccagactggaagccaagaactcaagcccaatagaagccagccacagagccatggggtaggcagtctgggctgcctgctctggacacctgaacttcagttggttcacacgcaaaataacagtgcatctaattttcctcagaggcagagctgttcagtaattaaccaactcctcattattttattattttattttcaatctttattgagtgattctaatgaattaaaagactttccaatcgttttgaaatgacagaaaataatatgcttctcgggtgtctctatttaaaaggaagcaaacactaaccctagaattttatctgaaaggaagttcatctcttttttgccttctttttcttcctcataactcagtttatggatggttcaaaaaaatgcatggtatcatcttatgaaaaaatggagagtagtgtatgaactatattgtaaataattttaaaattaatcaatattttctctttctgtagtattgtaacgagccatgtaagatggatacggattaaaaaaaatcatgcttaattcttaatttagtgcacttccatggttcattgcccacttcttttttaaaattttatggcttataataaagatataaaataaaatttctttttttctctttttttctattatatgcaccaatcttattcataactggataatactttcttttacattgtacaaatatcatataatcattgcttattttctattgtacatatatagaccaatgaaattcccttttcattggtctatatatgtacaatagaaaataagtcttaccgacttccaaataatttacctatttatctggtaacactcagtaacttctgaactgagcagaacacatatgacttcagtgggaatttgcctccttgagaagtagtggaatctggctacttcatatcttcttgttccttcaaactatatgcaaataaattattacaaagacactactgaaaatatccaatacccataaatcagtccaataaactatttaattggccatagtgggagatgggctaatgtataaacaacaaaatagactttctctagattatctttacctaccagcgtaagtagatagagcatcaacctttatgccaagtgtgaaataaatcatgccctgaatgtgcctcgtacattctcaatgtacagagttttaatatatttaaaacatcaaaccatggacatgtagttcttggctctacaatttatggcagataaagagaatttggctttctacctgcaattccaatgatccatgttgttctggaagactaggtttggattagtctcttatgagaaattgcttgtccatgttacaatgtttttactgattgcacttgtgaaagcagaagagtccaagaagacagtgtccctgtaaccacagaggagggaggagggcatgcctcctgggcttgtcaggcagaaactggagatcagtttgctgcttttgttcttcacttgctctcaaagaggacaacaatcactctttatttcaaattttccttggttcttcatttttataagtccctttcatgattttaatgttgtctattaaattgcatcagatagagccctaggcaggcaggcaggagatggaaattctagtcccctctgtgtcactgctagctgaaggaccttggaaaaatcattaggcctcttttggtctcagtttcctcccttcctgccttcctaatggtctgcaggtttacacactgatcatgcaactgtagggttttccctatcattaagtggcattccatgctggaaagcttttacagattcggacaaggcagtgaacatgatgggacagagcagaggactttgtggtgcccattcaaacataaaggtgaattgttcttgctcttcaggttttccagttcctgaggtgagctggtttagggatggccaggtgatttccacttccactctgcccggcgtgcagatctcctttagcgatggccgcgctaaactgacgatccccgccgtgactaaagccaacagtggacgatattccctgaaagccaccaatggatctggacaagcgactagtactgctgagcttctcgtgaaaggtaggctgctggggacctgccaatcctctgctcccccagaggacatctccagcaaattgggaaaggagtccagaaaaagctatgggcagaggtagatgcagctcttaaactacagaagggtctactggaggctgaattatttataaccaagttgtttgccttttggaatttaattttcctctagagtacatcgtaaaagtgactgagaatcagtttctcaatacacatattaaacactcaaaagtatgttaaggaaatattaaaaatcatgtttctcagcaagtagaaaagcttggagccttgtttataagtcctttaaggaataagacatattctccagggaagtgtgaatctccaggaattcacactttaacaagcatccagataattctgatgccggtagtctacagaccacccatttaagaggcatgtaaacatacccagaagaaaataaatgcttgtttattattcaaatgcatgacactgtttccccagaaaacttatcaccaatcttagtggcctctgttgtttttctctatcctttactacctagtgagacattagtatacagaatattgcatgcctttacatgttttataacaatatcttacatgagctacgtaaagttacatatgcttatccaataaactttaccttcaatgatgttcaattatagggctataattgacctaagcagaaaccacatcaagtaacatcaggtagaactttagcatgcacccagaaaattcacaaatggaaaatgcacagggttggcagcacctgctgttgtttattactcaaaatcatgtcaaagttaattccactcactcctcacacttataaaaaatttccttcaacataaccaaaaaaatcccctttctgtaacacaattaaaatgaagtaatgttattattgggattaacgttttaaatgcaagtaaatatttgggttatttgaatacctatcaagttggagaaggtttagaattttaaaaattaaattaaaaatgtaatgattctttaagtaacaggtacacccatcgtagcaaccactggaattcattttaatgcaacttactggaatatgcaacatggctttcacatattaatagagcgctagatgtgaggtagagggggaagtaccagaaagattctcaagaaatgttataacaaaatctagagcttttatttaaaacaaagaaacaaaaggtggtggcctaaactgctcagcaaaacaaagcaaataaaataaaatatggtggtgagaaagccttctgtaatctcctggctcccattcttgctgtcattgctgggtgagctgggttcaaggacattcaaggatgtttagattggcgagtcatcacctggttttggaattggagctgtgattatttaaaaataccttgtagggagcaccctggctctcactcttgactttgttctcttgtccccgcagctgagacagcaccacccaacttcgttcaacgactgcagagcatgaccgtgagacaaggaagccaagtgagactccaagtgagagtgactggaatccctacacctgtggtgaagttctaccgggatggagccgaaatccagagctcccttgatttccaaatttcacaagaaggcgacctctacagcttactgattgcagaagcataccctgaggactcagggacctattcagtaaatgccaccaatagcgttggaagagctacttcgactgctgaattactggttcaaggtacgtgctggaggttgaggaacagagagaaggggagagagctggtttgtgtctaaatggggccaagcgtccacttgccacctctcacagccctgggaagaatgctgtgagctgatataaaagctggcttttcgacacccatgaaaagtccctgagattctagtcaggagcgcagaatagaagcaatctgtgcttatgaatctcattataaactggaaagggtttcaattaagtgatctacatttccaaattattggcaaataatgaaattttaaaaaatcattctaagtaaatttttatcttgtaatgaacattttctatttttaaacctaatttatattcatgcaaaatccaaaactttctgcaattttctccattgggatatccagaaaatctttttgactttgtagtcagaattaacagaatctcttttaaaatgggtcattgtgccccctcccaaacattcatctttcccttcccacaggtgaagaagaagtacctgctaaaaagacaaagacaattgtttcgactgctcagatctcagaatcaagacaaacccgaattgaaaaggtatttttctatactgttggttttcaagcctttcaggctgttgcgtccccagctattcctcctcaacgtgggctttgttttaatcttttacagaagattgaagcccactttgatgccagatcaattgcaacagttgagatggtcatagatggtgccgctgggcaacagctgccacataaaacacctcccaggattcctccgaagccaaagtcaagatccccaacaccaccgtctattgctgccaaagcacagctggctcggcagcagtccccatcgcccataagacactccccttccccggtcagacacgtgcgggcaccgaccccatctccggtcaggtaaagctgccatagagagagcagattattgcacattttggaactaggttttgaaacgagaaagattcccttgtccccctcgcagggcatgcgacgcggagagtggttcgcttcttcagtgtcccgctgctcaaacctctaggggagcatacaaacgggcaggttgtggggctccgtgttcctctggacatccagccgcttgtgtgtctgcctactagggtctcaggggtttttataggcatagggtgtgggcgtggcaggtcagggtgatcttgggaaatgcaacatttgggcgggaaggcaggagtgtttgtcctcacctaggtccatgggcacaggcctcgctagggaccacgcacttctcttcccagcacttccctgccctcctcccgtgtaagtttcatgcactcaaaaatgtagcaggtgacaaaggaggtaaaccaagaagttactgaatatgattttcacaaatcctcactgtccacaggtaaattgaagacccttataaacttctgaattcttatttatatttcatgtaataaatatctactttaggggccaaaatatggcacagtgaaaggagaagagcacagaagttagagttcaaagccctaaggacaaatcagcctgatcacttaacagtttgatttagggcaataagtataaataataaaataattgttattatatatggatcacttcctctatcagattggaactatacatacattatctcattaaatgttcacaacctgtaagaattattatcctcaatgttattgataggtaactggaattaaagaagttaagcagtttatttaaggtttcagttgtgtcatctgtaaattaaagagagtcacaataagaatgatctcaagctgcattttggggcttcaatgagataattagttgaaagtgccttgtaaatagaaaataattatgccaatattcttatattcagatggtaagtaaaaccttttaaatattttgcatatgcttgtgttattttatctagaaaataaaatggacttctatgcttacttaatatggaagtattttagaaggtgatcatgtatcatgatcagggctcagaaattatataatcaagtgtaaattgtccacaacagttttgaaagtttgggatttagtttatcatgatgaaacttttaatatgatgaaatgaaaaatgtacaaaatttgagcaaagaagtgtttattgatcaatttaaatgaaataaaaaacacatggatgttccctgccaagaaaattttttataaaagaataataaggagatagttgacctaaataatattcaaacatactgtaaagttactataatcagaacagtatggtattggtaaatgaatagaaaaatacaccaggggaacaaaacagagagtccagaaagagatccaagtataatagatccaagtatatagggaattcaaaaagcaaagtggcctttcaattcaggggagggagaggtattttaataaagaatgctggtccaattagctatccatctggaagcaaacaaacataaacctctgcctctcactatttacagaataaatttcagcttgattaaatagttaaaaaatgaaaaaaaaagagaagacaatctgcaaaagcatttatgggtgaaagcttttaaaaagacagttacagattcaactacataaaaatcaacatgtatgtatggcaaaagcaaaaagtcatttctaaaccaaacagcacttgtgaaaaaattttaagacctttctcctcctcaaggtacttcattgcctctgccataaaagtatcacaataaacataaaatggctacaaggtagacaacaccagcctagaaacagtatataacatacaaaattacgtaagcttatgctggataagacccataaacaagcaaaatattgaaatggattaaaagaaatggatctgggggaatgtttgcaacacttacgacaaataaccaataaatgcactaaatgcattaaaaatcatccacaaattaatttttaaaggaaaaaaatgcaacacaaaaaaagacaaaagatacaaaaaagtatttaacataagaggcaatgtaaaagtccaataaacatgtgaaaaaaaatgctagatgttttccaatttttattgttttagccacaaaaatgtaaagatattggcaaacactaacatgaaaccttgaacaaaaagcttactttaaaaaacatgtctagcagtcgaataaaaaaaaatgttcagtctcaggctaaatccaagtttgcacaccatgaaatcacaacacaagccaaatgcaatttcttgaggagataacaacctaactatattttaaaacccaagcctaagggtcatttagaatcatggagtgtccctgatcccatggagcattttgaccatcttagcagttttgaaagttcattaataaccatccaaattgccccaaaattttgctttccaataattaagaaataaaatgccaatttgcagagaaaataatggttatcaaagatagactgcttcctaaatatctcatagtttaatcttgatttttgttgtagagtaaggcaaacatatttcattgaataaggtgcattgtatctcgctgtgaccaggtgattattttttgttgtaagtacagaaataagcactctcctataatgaccaaaattacaatgattttcacagttatgggcttacctgtgtcctgctgttaatcagtcatgtcatgctaatcatgtctttaactctttttgaattaaacccatttactaagtacagcaagaacaaggcacagggtgaaacttaaaagcacatgtctctttgcttttcttcagttagtggaaaccacacattattctaacttggtttttgttatatttcaaaggcagtcatgttcagaaaagaggcttattccctagatttccctttagtttgattacaacttcatttacaaaatgtaaatggattttcacacaaaaaaagccattcttcgagaaaataaacatttcttcgtgaaactggttaatgttgtaatgtactgttagggtactctgtaagttagagaaaatatcaactgtaccttgagcttaattagaataatcatttcatgtatgatcagtgtaagctaaatatcctagatagtgacaagatgcatttataaacattttcttatatgcagaattaataaaatgcaatgatagggcaatactgccacctagagaggaaaatgtaataagccttattaagaattaaatcagttctgaaaaaaattttaccttacaatagttggccaatccccagaattattgctatagatcagaaatagtcttttttggccatcagtgctgggatttagcacccaaattcttcaactgatgctacttgcactttggatacacctaaaaagcaaacaatgaaaactattctggaagaagcaactttatcaatttacccaaaaatcacagaatcattagtttttaagttagtcaattcccacaataactctaaagatatttaaaataagtccagagtgcaatacaaggggggcgagtgtaaacaaatatggaggaaattaaaagtagctgtccacaaacacttcggctaaagcagcaatttgcaaagtgcactgcacaacctgtacccagcaacatgctgcagaaagcttcctgaggatgtgtccccctgtcctggaaattcacaaggcatactgacatagtaaaggctgtgggaagtcctgcaggggaaaaaaaaaaatggcttaagctgcttagtcaagagtggcacaagcattttgattacagaaacctttcttcttataacacctatttgacatcctctaacccccccagaattggaatacagagatgaatttggaatacagaggttgctggatttgacatgtctttcctttggctgcatattaaagaagtagctttttctgttgtgatttttttttttttttaatgtgagaaggtgcaaggcacaaaatctccagcttatttggaattaaagctgattctcttacagggttacagcagataagaataggtttattgagatttaaaacaaattacttccaagtacattatttaccctctgaatgggttatggaggcacacattttaaaactctgccttaaagcacttccagcttttcatctcatgattcacatccagttacccctccttgctttgacattcttgacctctgccttttggttttcaggtccgtgtctccagcagcaagaatctccacatcccccatcaggtctgttaggtctccattgctcatgcgtaagactcaggcatccaccgtggccacaggtcctgaagtgcctcccccttggaagcaagagggctacgtggcctcctcatctgaggctgagatgagagagacaacgctgacaacctctactcagatcaggacagaagagagatgggaagggagatacggtgtccaggagcaagtgaccatcagtggtgctgcgggtgctgccgccagtgtgtcggccagtgctagctacgcagcagaggctgttgccactggtgctaaagaggtactgtcagaatggttttgtttttccttatttcacattctagtttctccaactggatttctgccatgaaactcagtctgtataaattggaggaaaaatgcatatgaacataaaaatatagcagcaactgaagaccaaattcagtagtcatgctttgtaaaaccatttttaattaggacaaaagctccaatctgtgaagtttccataatatacaggttttaatgatacagtctctgtatttcttggcaataataaatgcttatgtatgagtgtattttgctctaggtggctcagttttccagtatgcttttttattttctactgggcatgtcatttaaaaaagtaatctacttggtcatttctaatctaggtgaaacaagatgctgacaaaagtgcagctgttgcgactgttgttgctgccgttgatatggccagagtgagagaaccagtgatcagcgctgtagagcagactgctcagaggacaaccacgactgctgtgcacatccaacctgctcaagaacaggtacgtgcgaggctgccatggggcacccgcagagccacgtccttcagtgcacattaactcaaccaccatccactgagcttggcatgcagctgtgctcaattcattctgaagacagccttgagcccagcagggcccagacttttagaactttctgagcaaaaggtggtcggagatgtcaaaggtgttgacaatgtgagtatcacaagagcagagtaggccagaaatacctgggctatatgagcaggcaaaagtcaactatggtattcaaggtaggaaggcaaagagtggccagagaaacagagaccagtcaattccagagctcagtcactgcacacactggatgtggaaactactatttcagggaaggcattacatttctctaagtttccccaaaggacttttgtttttacttttctcaaaacaaacatgacacttgattcatagctggaacagtgtcataaatccaggataatgtcccacctcgcatttgaatagattttctgttacagtttaaaatcattccagctttcctccttatcctcttgtgtgacatttatgtctaaatcctgacagattattgtaacttttttttcttttctgagacagagtctcgctctgtcacccaggctagagtgcagtggcatgacctccgctcactgcagcctccgcctcctgggtttaagtgattcttgtgcctcagtctcgtgagtagctgggattacaggtgtgcgccaccacacccagctaatttttgtattttttagtagaggatttcaccatgttggcgaggctggtcttgaactaatttttatgtaagatgcattaaggtgttttcttcctttctctatgaaaagcaggtaagaaaggaagcggagaagactgctgtaactaaggtagtagtggccgccgataaagccaaggaacaagaattaaaatcaagaaccaaagaagtaattaccacaaagcaagagcagatgcacgtaactcatgagcaggtgaaaatgggtttgtattttaaattcactgaggttcttacaggggtcaacacagataatcacctttaccatgaagagtgttgttccttgggccacatggttgttagcatactaataagatccccttgttgtatgtgtaaatttctgggtactggataccaaagtttggtagtgtccctgaatgctccccttgtgagtatgaaaaagaactctgtgaacatacaccaggagtagaaacaggggtctcatcacattgatctggggatgcactaagtataagactatagggagaggacagatggctaaaaccaggaggaagaaatagatgctgaggcaggaatggggaaaagtggaggagacactgaactcactttgctttagaaatcttagcaactgcttcctggctccttcggaagacatttgcacatgagtttgaagtggaatggacagcatggctttaacaagccaaatgaccagaaaaggtgaaaaggacagccccatggttggcggcatttggggacagattggaaaatgccagttagtagagctcttggccagtggaaccagttggcagttgggtggtttgagaagatgaatttcaagtccctttcagccttgagatcctgtgtttcagtgatgagatatttgagaatggcaaagaggcaaatagagaaaactgtccccctacatacgcatataccttaggtgcccagatggaaacagcattcttcacagtatttaggaaaactgacaaaacaaaaatattgtataaatgcagattataaattatccatgcttgatttctcacatgtaaaataaaaagatcagacaaaattacttctaaagtcttccattctgatatatattctaagattacctttagatgacagaattagtacagaataatattgccatagatctatttgtaaacattggaagtcattttaaagaagactacaattctgctgttcaaaacaaagtgttgaattcaactttgttttctctaagcagcctacataatttacagtttaaggagagaaagagcatgatcttatttatgaacatgggattatttattttatttagtgacatctgcagaaaagggattttacatcttcaaattcctatgttgttatatttaataaacaccatattatttcattgggcatcaggaaataaagttttttcttaaatcattctttgcagataagaaaagaaactgaaaaaacatttgtaccaaaggtagtaatttccgcagctaaagccaaagaacaagaaactagaatttctgaagaaattactaagaaacagaaacaagtaactcaagaagcagtaagtctgattttctaaatattttgtagtttgttgacaatatcacattacagccagctgcaggtagcttatagtcaaaacccttaaatggagaagtctttggttgtatattttttgttattgttcctctatgtctagtattgaaactcaggatggaaattatgttcacattgcactattttccactcacttgatcagttttcaggagattgtctacagaacagtttagggcacatctatgaactttctagaacatacataaatggatgatagatatcatgccagtccagttacccaccgggacagttggtttcttcgtgcatagcctaagccctcagtcacttagattgtaatgcacaaactttacatgcacacacacatgcacacacacacacacacacacacacatatacacatacatcagccataaacaccccgaataaatagcaagggaaagtgaggatatgccagacatcggagaaagcaaatacttcctcaaaaaaaaaaattccttcaattcacggttgataaacagtgacctagaagcatttgctgctgttgtgccgtagagctgtgtgaggacaatctcagtgtcactaaaatccacatctctcccgtatgtgaaatcaaacctttaagtgtcaggagagaggcatttatcttgaattcttccatgtcaaagagggcgcctgtgctcatcctccttgaactcaagctctttgctgatcttagagctactttctttaaaggtccagttgagaaccttgtacacttaaaaggctgaccagaggctgctgactgaatttccctctccttactgtgagtgagacattttgaaagcagcaagaaccctacttaggataatcaaaggcatagaaatccccattgccattgcaatgctggtgactggcaagttcagctggcctatggttttccagccacttgtcagcagccacccaccgggttccctaacacgttgacatgtctcaagatgagatatgttcagttctaggacaatttgctaaggcgcatgtgggcagaaaagaagcccattcctcaggaaagcagtctatgtattaagcacaagtgtaggcccctgaaatggaaatctgacattttatcgttcaccactaagcatcctgtattttcctgagtgtttcaaggatgtcttcccattgcttttgtatcttttgaaactcaaatctttattttactctaaacatcagataagacaggaaactgagataactgctgcatccatggtggtagttgccactgcaaagtccacaaaactagaaacagtcccgggagctcaagaagaaactaccacacaacaagatcaaatgcacctaagttatgaaaaggtgatgacttcctgccaatgtgaaagtcactcttgcaccatttcatttgcaaatcacctacattttcatcatggatcttaatcatcacttcttcacttccacctcttcttataatgcaaatagaaaatttcttttcccacacagctacctttcactgtcaattcattcctaactttcagactttctttggcttgttactaatataatataataattcactttaatatcttcctattgaagcagatgtccgtaaacaagtcaattcataatacaaaaaattatgtgctatttacagtgctactgaaatgtctcagagattgcagttttaaaaaatgtgaaaagtacaaaatagcactcattagtcttttattgctaatcacatttttttcttttaaactggacttattgttttgatatttttgccagtgaaacagtatggatgatcaaagtaactcaaatgatatattttagtgcaattaaaatttccttgaataggaagaaattttgcctcctttctttttgacttacgtttcttttattaaagatttatggaatttaatgactattttcttactttcttttgtatgatcagataatgaaggaaactaggaaaacagttgtacctaaagtcatagttgccacacccaaagtcaaagaacaagatttagtatcaagaggtagagaaggcattactaccaaaagagaacaagtgcaaataactcaggagaaggtgaatacagatatttgagctgtgaaaagttcatctttaaactaatttctagtaaactattaactacaatatggtatgaattattaatctgtatttgccttttaaaatccctaactaaaaacaaaatggtaaatatgagactgattatcattaattttatctgcacatttgattttcatccatctgtaacatttataattcattttattcaccattattctttgcatgaagattagcattttttagcttaatttttaaaaagtgacacagggactcatctagaggttttttaatagctaacatttctaagttttgtgattctcagtcagtatatgtagacattgccggtgaaagtttatttctcttgtgtatttaaccctgaataaccatcttgcatccccatgaggaagggggaagggtcatactatgtgtgtttgaagccctgttcaacttaaatcttgattttactgtaataatcagatgagaaaggaagccgagaaaactgccttgtctacaatagcagttgctactgctaaagccaaagaacaagaaacaatactgagaactagagaaactatggctactagacaagaacaaatccaagttacccatggaaaggtgactattgttgttccaagtgtgaaatcccctattataatacattaataccacatatcatgtgaaattccttattgtaatacattaatatcaagtctctgaatttcttatgtatgagtcactattaaccaaatttattttttagacaattaaataattggaaactaaaaaaatttattattgttaatattactacatatccctttctccacttatctcttcaccattattgtcaacattttattaacatctgggaatcttccagaagttgattaaaattgcatgcaggctaattttaagaggcccatgaacattttttaaaaacacggaagatgtataagtaaatgatgactcttactcactgtcaagaagatgtgtgttttgaagggtcataaattcagtatattatgttatggagtatgacttatttcagtaaattacccataattttctttgtatgaaactttatcttttttccctcctgtaaatatcagaggagaagataagctgaaaaaattataatgcatgctgtagcagctcccactaaagctaaacaagatgcatattaaaatctagagaaggaagtatccaaacagaacaattacacataagccatgaaaagattaccgtatctatttgtagctatgaaatatccatgaattaaactgtttcccatgactctgtcatttactccaaatgagccatttacctaattgtattctttattgctaatataccacttgaaaattagcaactaaagtttttccatttcattagcaggatggcctgaatcctatttgtatttccctcagtgtcattttctgactctacatcttttttttctaagatatgatttaagataaactttttaaacctttactcaaatctaacatttaatggcatatcagcctttcagaagtctcataaatgacagaaattccactatgcaacatacttcatgagtgattaactttttacttttgtttccattcaaattttgtcatgaattgactatcttgtttttgttaaaaattagctaaggatggaagctgagaaaatgtttatacctgaagtagtagttaccactgcaaaatctgctgaaccagccacaccgccaatgactagagaaggattcactattaaacaaaaacaaatacatctttttcgagaagagatgaaaactgatgctatggaggtgaaaagtattgtttcatcccatttcatcatcaactctcataacttttcatccgtcgtgaattgtgcttctagtgttccatctaattgtttaactgatcaataaaacaatagagatggttagattcagtccatcctccagttgaacagtgagcatttctagtagtgaaaagtcagaccaaataatactcttctttatgtctcctaaatttattctcagcatttaactcgtatgaattggagtattctagtccaatttgtcttcctgcttctctaggttacaaacatgtgagagatatcaaagtccactaagaaataaaagcggttaccagcatactcatttgtagtccaccaataagtgtgtgtatataaatctgatatacaataattcaaggaaaaaacagacagatgcttcctcaatttaaaatattttaccatgattaagatttttccatatgtttaaaatcaagaacaaaatttaaatatttcagttgtgtgatatttagtcatatgacagtttctttgacagtttcttttatcattgttaaaataaaattaagacttaagctgactacttcatagcagactggctaaaaggttcaaatgagatatagtggaaatgtgatcacactacaatcaaaataatatttatttatttagtgttatctgtcgaagatgttaacattttaaaatgtctatacaattaaagtcagctcattgccaatatagtttttaaaaaagaaaaaaataaatggacaaacttaactcacctaagcctcatgtgtattttatgtttttttctgagatgatgcaatctaaagtgaagatggtatttgcagtccttcgaggcagatgaaattgtttgtgtcttcctaaaaggaagccctggataaagcccatgatcactaaagacccaattccatctcagaaaaatctcatttatatcttgaatggttcagagaataatttttaaagatatgcaggtagcatagttgaagaatgtttctgatgcattctagattctattcacaggtatagaaaactgaatattaataaaattttccaatcttacttttaaaatgcacttttaaaatgtacttttaaaatgaacatggctatgtgatttttgaggtatgctgtttccaagtatcacatagaatcataatatctaagccacatcagctagtttgccttctttaaaagagaacctcctctgcaaattgtatttccattaatgttcatcagactcagaaacgagaaaataatatttgtttcattctttgctttaactctccataataatgaaagtaaattaaacttcaatgtgaaaggttgttctcttgaatccaaacatgataacactttcattttaatcacaatatttttatttgcacggggttctctttgtcatctgtgtgttttaagaaaggtattttctgatagattaaacaatcttacccttagggaatcataagtaaattcatatgctcactctgtgtttgtgagctttcatgttatgtccgatttgcatgcaaccatataactctgtagtcactgatttttctggacaggatgatgacggtatttgagtgcacttatatcatcactgtcactgcattaataccagactaaatggtcaacaagataataaaaataatcagtgaaaagaaccagctccaaaattctgattttccaattgctgattgattgtctgcctggaaaaattctagaaaatttcaaaatcttcttgtgattttatgttcatattgtgattgtcctatgttgtgtatatgtgatttaatgtctagtataattaagtaggtgtacagagagtatatctaaatagatgtctgtacaatataataatcaatgaaatagtccctaaaagtgtttctgagatacatttctagacacgttaacactgctgtataatgtggacgccatctgcctgtcctgatgcccaggagatattccagcctgatctcgatattcctatgtattaattctggaaaccttgtctccaggtggacgttggaaaaaaggctgaagctgtagcaacagttgttgctgcagtagaccaggcccgagtcagagagcccagagagcctgggcatcttgaagaatcctatgctcagcagaccactttggagtacggatataaggaacgcatttccgccgcaaaggtagctgagcctccccaacgtccagcctcagaaccccacgttgtccctaaagcagtcaagcctagagtaatccaggctccttctgagactcatatcaaaactactgatcaaaagggaatgcacatatcatcacaggtgagtctatacctgctgatttttcaccttgttcatggtaaagcaagcctcactgctgtggtcatctggtgatcaatggtatcactgagtttcatttcaatgcagatcaagaaaactacagatctaacaacggaaagattagtccatgtggataaacgcccccgcacagctagccctcactttactgtttcaaaaatttctgttcctaagacagaacatggatatgaggtaagaagttacagagcatgatacagaaatgtttaaaggaaataagtatctaacctgtgaaacagagcatctctggggtaggccaatggaggattcttttttggtgatgtgtgtgtgcgtgtgtttgcattcacagtgggcccagacaccctaaagatttggtttctgaaactcgcccaggggagtgagcctagagtcacaagtggttatcttatacctctgaggagagacaaatccacacaggcttctctctagttcacatttcagggacagctcaaactcaattgttttgattactattgttctaatgattttgtgaaaggtagtgtgttacacagcatagttttacttatgctgtgagacatttcagagtaacttaactgtgaatgtgtttcaataataaagacagacattgagaaatcatatatttatatactcaatatagcaagatggagaggtggtactgtatggtggtcgggttggattgtggaatcaaatagctctggattagtgccctatcttctcccttataatctctgtcatcaggagaaagtaagcatacatgtaaaatgcaagtaaaaaggacataaaaacctgcagttgtcagcatgtaataaatccttgatattagtcactattgttattatacacatccaagaaatagaacccaaaccttctatgccttcaaagaactgtaagttacatataatgcctatatttgatttagtcccaaattacaaaacaaataaccatagaccacaacagaataaaagcagtaaggaaacctttaaaatattttttctgaatgtcttcatgtttacctttcacatagatttgtggctaaaacccaaatgtactattgcaaagtagttcttaggcatttaccaacaatttcaataatttcttaattttgaatctcccactgtggtattttcaaaagtggcattcatcggaatggttaagtgaaaattcgtgactaagctttagaagatcctgtccttttatgataaaagctgtaaaataaggagttctgaatacaactctttaaaaaagatattttaaaatttgttttacaaactaacaggcatgacaaggagctttataattggcttatctctaaatgacttttcattaactgtgtgataatgagtgctaatgagaacattaaagaacagaccttatagaaaataggctcagactcagtccaagagggctagccatcggaggatggttaaatgactttattttctgactctgtttccatgtaggcatcaatagccggtagtgctattgccacattacaaaaagagttgtcagccacatcttctgctcagaagatcaccaaatcggtgaaggctcctactgtgaagcccagtgagactagagtaagggcagagcccacacccttgccacagttccccttcgctgacacaccagatacttacaagagtgaagctggcgttgaggtgaaaaaggaagtaggggtgagcatcactggcaccaccgtccgtgaagagcgctttgaagtactgcacggacgcgaagccaaggttggtcactggttacccgctgttacatggtccactcccattgagcagggccaggtggttggctagtttgtactgaaaagtagccagtggagtcttgcctttctcctttgccatactaagacttgatttttatggagcatagtatgggtcagagatcattttctcaaattatttttataattatttttatatttttataattatataatgttgcatgagctaagagtttatgagatttcccttaatttcatgagcattttgtaatataatttgtaaaaatctaggtaacagaaacagcaagagtaccagcacctgttgaaattcctgttactccaccaactttggtctcggtgagtaaagaagttgataatgctggaccctattcatatctcctcaaatcattttaatacacgtttgcaaagatcagtttctcaaattaatacaaaaatgacattagtgagcttacagatgctcattttaagaccgtatttggtctggaagaccatatttgaccatatttggcaaggaagaagggaattctatgtggtacatcattcatggattcaaaagatttaatgagcttctaatatgcagaaggcattattgcaggagctgtgcagacataaagaccaatccatccctctttgaaatattttctttgccatcagagaaaatgtacacaaacaagcataataaaatatataaggtgataaacatcacaacagaaggagaatccatgggaggcatagattcattccagttggtgataccatggcaaagctttgttgaataggtagcatttgctattgagccttacagctctttactaatatattagtatattatataaatattagtttctctactactatttctggagtcctgattaaaaggccattttgtggcagttgaaatgcataagttcaaactctacatttgttacaaaacagaagtgattaatgaatatgcacacgtatcattatttattttttctcctctcttcagggcttaaaaaatgtgactgtcatagaaggtgaatctgtcaccttggagtgccacatctctggatacccatccccgacagtgacatggtacagggaagactaccaaatcgaaagttccattgacttccagataaccttccagagtggaattgctcgtcttatgattcgcgaagcatttgcggaagacagcgggcgatttacttgcagtgctgtaaatgaggctggaaccgtcagcacatcctgctatctggctgtgcagggttagtggccaccctcccacagtcctaatgcacatgccatcactttcatctgacactcttttccacaatatggtttctgtgcaccttgaaatgatgtccctttttggaacttggggggagattatatggtcaatttaactgtcagtgctaagcaggggtcactaaacatctcatctcaatgagaaacttttgtcttcttttagtgtcagaagaatttgaaaaggaaaccacagccgtgactgagaaatttactacagaagagaaacggtaaaatattttgctaattagtagctgttctagtaccattttgactttcagccccaccagtattggcaaattgcaacccggaagctaatatgaggggaattctctttccagctttgttgagtcaagagatgtggttatgactgatactagcctcacagaggaacaagcagggcctggagaacctgccgcgccttactttattacaaaaccagtggtccagaaactggtggaaggtgggagcgtggtgtttggatgccaagttggcggcaacccaaagccccatgtatactggaaaaaatctggtgttcctctaaccactggatacaggtattttgatggctgaatatagagttctctgtgacttgtataatacgtgcatgaagcctagagtagaatttactcaccccaccgaccctgagcataggctctttcattgtggagccttcttagtttgttttgaggtatttttacattttttttgtgcaaagtcttcctaagaaataaagctatgtgacaaaagtggatggaagatatatttctttacattatagtttaattcattgagtttgtgaaagtagagaaaatatggattttcacacaaacacacccacacacacacacacacacacacacttccagaaaagatttgagacaattttcaataaaaacatgtaataactaagtgactaaaagatagaagaatagccatgtaatgaagaagaaagctagttatgcacaaaaatctatgctagtaatttttcttcaattcaatataaaatttagctctgaatattttgcaatttaagataaaaagagcaacctggtaatctaaaaatgtaggtgccgtaccttcataataataaatataatgtaccagagagttaatactgaaatatttgaaggaatttattgttttaattattcatttgatctctgaatgaaataatgagaaaaataacgaacaaagagaaaatacctgttgtttaagtgacctgatcatttgctaacataaacactgaaaaccacttaatttcatgactgattctagcaataaatattctttaaaatgaatattttaacttatttggccctaattactcatgttcttgcatttttctcaattttcagcaatcttataatctattgtggagcttagtcatatgtttagggtcattgaattttataccacagatccactcacagataagtccaattattttacccacagaagagttgttgataactgatttttaaattttgtacatttacataaagatacaaagtgagttacaacaaacaaaccggtgaatgcaagctggtgatttctatgacttttgctgatgatgctggagaatacactattgttgttcgcaataagcatggagaaacttctgcatctgcttccttgcttgaagaaggtaagtgcaactccagtttctatgtgcatgataagaactgaaatacaaggagatagcagtgctgtccgtttgctgaaaaacctgttgccacttactggttctgatactttgccccagtgtctttgcctcagttgtatggaaaatgttttagaccacatggcctcaaaaactatactgtcattaaacttctgaggttctagcaatagtttctttttgttgtatttgtttctaggcatatcatgcctctgaaaatgcagagattctaaatccggttgccttccaggcccaggcaggtaacagtgagctcaatgaaaacagtagcaaactggagagtaggtgccctgcctcaaagagacagtagctgtgttgttgccaggcatgcaccaggctgttaccaggctcagtgttgctagagctcctgatatcttaaagaaaacctggaagtcaggattttcaatgtttataacttgaaaacaaatgtaacagctttcatgctagactgttcacatttacagtgaactggctcacactctgtttcacttgacctacacagtatcccttagaggaaattacaatattatcttcatttagcagataaagcactcaatattcaggaaggtaaatgaattgttaaaagacacacagcaaattaggaagtcctccgtggtagatccccccaaaactgactgctaatataaaattctttctacaattgtaatggctggttggatttgttagtgttagtttggtttccaaattccatctagaaaatattgagcacttcaatagtagatatttggaaaatttggtttttggttatcaactttccccagtgtagagtttacctgaatgcatagtggtatgactgttttctaataagagcattaaaaattaactgatgttcttaactcttagctgattatgagttactgatgaagtcccagcaagaaatgctttatcagacacaagtgactgcatttgttcaagaacctaaagttggagaaacagcacctggatttgtatactctgagtatgaaaaagagtatgaaaaagaacaagccttaattaggaagaaaatggccaaagatactgtagtggtcagaacttatgtagaagatcaggtgagtataaaagtaatgaccaaccaaacaatttcataaattatactttcctttttttatttgatattttcattttcaagtgatgagctcggggttagacagctattagaaggtccaagttcactgttgctaagtttccttaatcttcatggtatgttgcacctgtgagtttagaaatagagattacatataggccataaatgtgactttaaaaatagggcttataatatattaaggaaaacaccaatattagcacagctgagttcattcatgccaagatctcttcatctgtgtgataagctaatgtaacctctaacccaaatctaactcctgcttttggaatacctttctacccaagatgccacaacattcactgggaaagatgaccataatgcagattaaaacaaacaaaccaaaaagtcctctagattcttctcccagctaaaaacttcaacagtctagctcagatacatctccttaaataatttatatcagtaaggatatgtatttttaacagaccataatctttttgcataggaattccatatttcttcctttgaagagagacttattaaagaaattgaatatagaataataaagactacattagaagaacttcttgaagaagatggagaagaaaagatggcagttgacatttctgaatctgaagctgttgaatcaggatttgattcaagaatcaagaattatagaattcttgaggggatgggtgtcacttttcattgcaagatgtctggatatccattaccaaaggtaaaatataaacatttatcatagctccttgccacagtaaagatacaaattggttaaaatataactatttgatgtaaattttattcatacatgcatggtattctttgcagattgcttggtacaaagatggcaagcgcatcaaacatggagaaagataccaaatggactttctacaagatggcagagctagtctgcgtatacctgttgttcttccagaagatgaaggaatctacactgcatttgccagcaatattaaaggaaatgcaatttgctcagggaaattgtatgtggagcctgctgcaccacttggagctccgacttacattcccacactagagccagtgagcagaatcaggtaagacttgtaataatttgggttatttagtatgtaaattgttttcaaaacatcaaatagtagcaaattgctattgtgtaagaagaaaatcgagggctaaaatggcacagaaacttaccattggcaacaccaacaattgccagaagtttttatttcttgcccctgtgtaagatgagcaaagaattttcatcagtgtaacatactgtttattttcctagtgctatagctaatatcacaatagctcttatttgacacctgatttttacatatgtaaatttatacaacagccctgcaataaaaagatgactattattggtttggaaataggaacactgaggccctgggaatctatgaaaattgtcttaattcatccagcctgtaagcggtggtgccagcattcaaactccaagtcagtctggctgcaatgtgtagatggagtcttgttttgctttgttttgtttccaaattcatttctatgttttcctcctctgagataaagaatgtgtattttttatttttccataaatgtattcattggtttacttatccaaccaacatttattaggatgttttagtagttaaatcaaaaaagtctagtgactgattaaatccaagtggtaaggaaaagagagtattgaggattattccaagatttttgagcctgggtacctggatatactgaatgactaccagctaaaattgagaatataggaaaaacatagttgtgggggcaacaataatatattctattttagatctgaatgagtttgaggtgccttctaatacgtgcaagaagtaaattctaaaataacatgaataatgaataagacaaaatgaagtttgttttgctgagttttctttatgcctcacgaaagtattgtgtgtctttgttttgcagatctctctctccacgttcagtgagcaggtctcctatacgcatgtctcctgcacggatgtcacctgcaaggatgtctcctgcacggatgtcccctgcaagaatgtcccctggacgtaggctggaggagacagatgagtcacaacttgagagactatataaaccagtctttgtgttaaaacctgtttctttcaaatgtttagaagggcaaactgccagatttgacttaaaggttgttggtagacctatgccagagacgttctggtttcatgatggtaagcgtgataagtttttgctcatgaatcataaaaacacaaaaacaagcttatgtatgcatctaacaatttttaaaaactattttaaaatctactttcttttaaacatattttcacaggccagcaaattgtcaatgactatacccataaagtagtcattaaagaagatggtactcaatcactaattattgtccctgccacacccagtgattctggggaatggactgtggttgcccaaaacagggcaggcagatcttcaatttcagtgattttaactgtggaaggtaaaatgagataaaataaaaataaatgaattttcttatcacttgggttataaacaggtatttcagccttactccctctaaatcatgacctttctctttcagctgtggaacatcaggtaaaaccgatgtttgtagaaaaactgaaaaatgtcaatataaaggaaggttcccgacttgaaatgaaagtcagagctacgggtaaccccaaccctgacattgtatggttgaaaaacagtgacatcattgtgcctcataaatatcccaaaatcaggtaagtatggaaataataaagctaagctcattatacaaatccaataaccagggaagctataccactatattgattattccctcccccaactttttatagaattgaaggaaccaagggagaagctgcccttaaaatcgattccactgtcagccaagattctgcctggtatactgcgactgctattaataaagctggcagagacactacaagatgcaaagtaaatgttgaagttgagtttgcagagcctgagccagagagaaagttaatcatcccacgggggacatatagagcaaaggagattgcagccccagaactggagcccctccatttgcgatatggccaagagcaatgggaagaaggtgatctctatgacaaagagaaacaacagaaaccatttttcaagaaaaaactcacttccttaagacttaagcgctttgggcctgcccactttgaatgcaggctaacacccattggtgacccaacgatggtggtggagtggctccatgatggaaagccacttgaagcagccaacaggctccgtatgatcaatgaatttgggtactgcagccttgattatggcgttgcatattctagagacagtggtatcattacttgcagagccactaacaaatatggaacagatcacacatctgctacccttattgttaaagatgagaaaagtcttgtggaagaatcccaattgcctgaggggaggaaaggcttacagagaattgaagaattagagagaatggctcatgaaggtgcacttacaggtgtaacaacagatcagaaagaaaagcaaaagccagacattgtcttgtacccagagccagttagagtacttgaaggggagactgcaaggttccgctgcagggtaacaggctaccctcagcccaaagtcaactggtacctcaatggacagctcatccgcaaaagcaaaaggttcagagttcgctatgatggtatccattacctggacatcgtggactgcaaatcatatgacacaggtgaagtgaaggtcaccgcggaaaatcctgaaggtgtgatagagcataaagtgaagcttgagattcaacagagggaagattttaggtctgtccttaggagagctcctgaaccaaggcctgagtttcacgtacatgaaccaggaaagcttcagtttgaagtacaaaaagtggatagacctgttgacaccactgaaaccaaagaagttgtgaagttgaaaagggctgaaagaattacccatgaaaaagtgcctgaagagtcggaagagctgcgcagtaaattcaagcgcagaacagaagagggctattatgaagccattaccgctgtggagctcaagtctcgaaagaaggatgaatcctatgaggaactcctcaggaagacaaaagatgaacttctccactggaccaaagagttaactgaagaggaaaagaaagctcttgccgaagaaggcaaaatcacgattccaacttttaaacctgacaagattgaactaagtcctagtatggaggctccaaaaatcttcgaaagaatccagagccaaacagtgggccaaggatctgatgcacacttccgggtcagagtcgtggggaaaccagaccccgaatgtgaatggtacaaaaatggtgtcaaaattgaacggtctgaccggatctactggtactggcccgaagacaatgtttgtgaattggtcataagagatgtgactgctgaggactctgccagcatcatggtaaaagccatcaacatagctggagaaacctccagtcacgcattcttacttgtccaaggtaatttgcatgtctttcctttgatggacctgtctttgtattcaagaatatccatgagtgtgtttacttttattttctttccccattcctcaggttgagaatttaatttaatataatgtgctctcccctttttcccccacctttttcttgtagccaagcaattgatcactttcacacaggaattacaagatgttgttgctaaggaaaaagacactatggcaacctttgaatgtgaaacttcagaaccatttgtcaaagtgaaatggtataaagatggtatggaggttcatgagggagataaatacaggatgcactctgacagaaaggttcacttcctctccatactgaccattgatacgtctgatgctgaagattacagctgtgtacttgtggaagatgaaaatgtcaaaacgactgctaaacttattgttgaaggtattcaacaacgaaggatttcattgtttacctaagctctaaagtcacccttagcatgtggtaaaattagctatgcaatttttctttcatgaaacaattatttggaaattgactataagtttcatagccagaatcataaatttatgttcgtaattaagaatgttaacaatttgaccatttggattttttaaagtagtattatcttgatttttagcttttaagttttttattgaagcataattctttactttcaaaaatatttaaaaattaaaataaaataactgcttcttattgaaaatttatctctcagcccatcagcgggtagatattaagaatacacctgatagtatgggggagataaaagacatacaagacatcatctctatcctaagtctagatgcatacctctccaaaaaaattgatttatctttctgttatacacttcaggtgcagttgttgagtttgtgaaagaacttcaggacatagaagttccagaatcatattcaggagaattagagtgcattgtatccccagaaaatatagaaggaaaatggtatcataatgatgtggagcttaaatccaatggcaaatatacaattacatctcgtcgtggacgtcagaacctcacggtcaaggatgtaaccaaggaggaccagggagaatacagctttgtcatcgacgggaaaaagacaacctgtaaattaaagatgaaacgtaagtcctcccattcctgtcagcctgcagtgagcatcattatggtttattgataaaaaatgatcataacattctttttctccccatatttcacagcccgccccattgctatcctacaaggacttagtgaccaaaaagtctgtgagggtgacattgttcagcttgaagttaaagtctccttggaaagtgtggaaggcgtctggatgaaagacggccaagaagtgcagcccagtgacagggttcacattgtgatagacaaacaatctcatatgctgctcattgaagacatgactaaggaagatgctggaaattactctttcaccattccagcccttggcctctccaccagtgggcgtgtctctgtctatagtgagtcctaattataaaattttatgtttacactattaagcaacataaagaacttcaaggagcagacaatttcaacaaaattcattcatcttgtgtgtgtatgattttgcaggtgtggacgtgataacacctctaaaagatgttaatgtgattgaaggcaccaaggctgtgcttgaatgtaaggtgtcagtccctgatgtgacttctgttaagtggtacttaaatgatgaacaaatcaagcctgatgaccgtgtacaggccattgtgaaaggtactaaacagcgactagtcattaaccgaactcatgcttcagacgaaggaccttacaagctgatagttggcagagttgaaaccaactgtaatctctctgtagaaagtaaggattattctacctatctaataattactttaagcattctactttcccagtgtaacaataaccaagagattattttattttttccccagaaattaaaattatcagaggtcttcgtgaccttacctgtacagaaactcaaaatgtggtgtttgaggttgagctgtcccactctggaattgatgtcctgtggaattttaaggacaaggaaatcaagcccagttctaaatataaaattgaagcacatggaaaaatatataaattgacagttctaaatatgatgaaagatgatgaaggaaaatacacattttacgcgggagaaaatatgacatctggaaaacttactgtggcaggttggtatatttattaacctaaattcttacgaggagtgattgttattttaagaaattattattcatttcccccaaaattcctttcagtttcccacttccatgcctctgcttatgctgttcccaaagccaatagtacttgcaacaccattcccaccagcctaaattacaaatgttcttctaggcctacctcaaacgtcaccttctccattaaaccttccttaatctctccatttgtatatgatctcttcctcatccaaccccaggatcactttatatgtgcctctttcctagtgtttattatgcacttgtcttattccccatttcctctttcaatatcagtgtataaactcctgaaatctggaattctatttgtatattccaatatattgcaaatgacagataatcaattggtgtttgctgtattgagctttatttaaacttccttactctaaagaattatttccttttttagccattcttgcttctttagcctttgtgccttttattttcttcctactttttaatgaaatcaataaatattttcaaaatacagcttaatgtaactgtatttcttatgatatcatgtagaaataagaccatcattcagtagaatttcttagctttacaatgaagaataaaaaatgtaaatcaattgccagaaaaaactagaagtcatcattaatttgtttggttcattacagtttaaattttgaggagttgagatgttacattcagatcgtgttgtccattacatctagtattgaagcaagtcatatggtaatgatttgtcttatttggtatgaaagtttcatggtttatacttacttacgttataagatttcttcagagatcggaccatgaaaagacttgtaaaacaaaatttcagattcagcatttttatacatttaatataaattacatgttttaaatgtgtggaaacaggaataaactatgaactcctctgtgatttcacccagtgtttttaaagtacctaccattggtcagacacttgtagaaactcaggacacaaaactaaataagaaatgatttttttcttgagaaattcataatttagagaggacagatacataagcaactagcttgttaaagcagtaattatttctgctaatggatgataagagtggaggcaatggggtgaaacttcatagaatgggcgacatttgccaacacagtgatttttaatatatagaaatcctcaatgtagtagaaacattgatgactcgtacattttgtttagcaaatttttatgtagtcaaaatatcagattcccaggaaataatcattaaaagaccaagtaaaatgcttttgaagaagaaggaattgggttagagactatcctggtggtatactgttctaagaatttcctattaattcaacagttattttttcttcacaaaacttttctgattccagtatttctcctaattatcagttatgcatacttagaataagggatttctttggtaccttctcaatatgggtaaaaacaatcatagacatttcatgatttcaaaatcatgttcttaaatttgatattttatatttacttctgcaaagattttcccattgtgtgaatatgtttaaaggactcatactgtacatctcttgttccaaaggtggggccatctccaagccactcacagatcagaccgtagctgaatcccaggaagctgtgtttgaatgtgaagttgccaacccagattccaaaggcgaatggttgagggatggcaaacacctaccactgactaacaacatcagaagtgagtctgatggccacaaaaggagacttatcattgctgccaccaaattagatgacattggagaatatacctacaaggtggccacctccaaaacatctgccaaactcaaagttgaaggcaagtaacataggatttgtccttttcaaatcatattacaatcttgatcgttatcgttttaaaagacaaacgatatggccattttggataccataaattttcatttcataaagtcattctagatcctctaaaccttcctgagacacattccacaaggtacaaaattgcttatcaaatgcgtttatgcaaaaaagccatttcttaggttaaagctctgtgaaacagctaaatcagacactgattctccattcgtctttcacccttctccaatcagtctattatgctgctaatacatagctatgcaaacttcatactactaaagcatagaaaaatcatttcacgatgtacatgtccagttggatcccaggttcccctaaataatctcaggtgttttttaaaacagaggtgctgcataactgtaaaatgtttggtagccattcttttgcagggtgagtaagcaatgatcttgttcaggacttcttttccttgatgatgtcatctatattttctaacccaatcataaatttgtctttagctgtcaaaattaagaagactctgaagaacctcacagtgacagaaacacaggatgctgttttcactgtcgagcttacacaccctaatgtcaaaggtgtccagtggatcaaaaatggagttgtgctggaatccaatgaaaagtatgctatctctgtcaaaggaacaatttactctctgaggattaaaaactgtgccatcgtggatgagtctgtttatggcttcaggcttggaaggcttggagccagtgccagactgcacgtggagagtaagttgatttagaaacacttttcaagcagtcagcccatggttaccattaagttaaccctatcactgaattgctccaattttcctcttagctgtcaagatcattaaaaagccaaaggatgtgacagccttggaaaatgccactgttgcctttgaagttagtgtttcccatgacactgttccagtaaaatggttccataagagtgtggaaattaagccaagtgacaaacacagactggtctcagaaaggaaagtccacaagctgatgctgcagaacatctccccctcagatgctggggaatacacagctgtggtcgggcaattggaatgcaaagcaaaactgtttgtggagagtaagtatcaggcagccccctacagccctttccttaatgaaccccatgtatctatttgtttggtttcatctactttttaaacaaattgtattaactgaagtgctctttgattttaccaagcattacatattacaaaaaccatgaaaaatatcgaggtgcctgagaccaaaactgcctcttttgagtgtgaggtgtcccacttcaatgtcccttccatgtggctgaagaatggtgtggaaattgagatgagtgaaaagttcaagatagttgtgcagggaaaactccatcagctgatcatcatgaacaccagcacagaggactcggcagaatacacatttgtctgtggcaatgaccaagtcagtgccaccctgacagtcacccgtaagttaaaaaatatatatatatatatacacatatatataaaatatcaaatattcagtagattcattgatattctatatcctacactttgctgaccactcaaaaatccttgattgggtgggcagggtggctcaagcctgtaatcccagcactttgggaggccaaggcaggagaatcacttgagatcaagattttgagaccaggctgggaaatacaatgagatcctgcctctagcaaagacaaaaggaaaaaaaaaaattagctgggcatggtggcacacacttgtagtcccagctactcaggaggctgaggtgggaagatcgcttgggcccagaaggccaaggctgcagtgagccacaatcacggcactgcactgcagcctgggcgacaaagtgagaacctgcctcaaaaaataaagaaaaaaaattgttaattgaaacatctagtatgtggttacactgagtaaagcactagtatctccacctggataaaatgttccagttagagtagcattgaaaggctacctggaaagatgcctcagtgtctatcacttgatctttctgttcctctgtgagttggcactgtcctgtatagtacatggaaggtatcaaagcttatatctctaaactgtaatctcctcaacagacgcactaaaaacattccaaatttttattctgcacctgttataacccacatcatatttacgtaaagtctccttgggtgttttttcttttctcctttgcagcaatcatgattacttccatgctgaaagacatcaacgctgaagaaaaagacactattacttttgaggtgacagtgaactatgaaggcatctcttacaaatggttaaagaatggtgtggaaatcaaatcaactgacaagtgccagatgagaaccaaaaagctcacacactcactgaacatcaggaatgttcactttggggatgctgctgactacacctttgtggctggaaaagcaacatcaacagccacactttatgtggaaggtatggtttcatacatattagatccatagaaaaaatgtcatacatgctttataaaatttagtgtatcaattaatgaatggataaataaaatgtgggatagccatacgatgggatatcattcagcaataaaaaggaagcactacgatatgctacaacatggatgaacctttaaaactttatgctaagtgaaagaagccagagaccatacaaagaccacatattgtatgattccatttatatgaaatgtccaagatacacaaatctatagagatgtagattggtggttgcttaggtctacaggggagacaatagaaaagtccttggggtgatggctaagggttacatgatttcttcttggggaatgagaatgttctaaaattatggtgatggctacacaatgatgaatacatggaaattcattgaattgtatactttaaattggtggattgtacagtatgtgaattatatctcaataaagctgttaaaaatgttaatttttctacatgctattttccagctcgtcatatagaatttaggaaacacattaaggacattaaggtactggagaagaagcgagccatgtttgaatgtgaagtttctgaacctgacatcactgtacagtggatgaaagatgaccaggaactgcagatcacagacaggtcagttgttttgtcttgctacattccagtaattcccagtttcctctgaatcaccatacggtaaactcgaatttccatttcatccatagaataaagattcagaaggagaaatatgtccaccgccttctgatcccatccacccggatgtctgatgctgggaagtacacagtggtggcaggaggcaacgtgtcaactgcaaaactctttgtagaaggcagagatgttcgcatccgaagtattaaaaaggaggttcaggtattgtctacatactaaatgttttgaaaaatcatcagtagtccataatctatcattttatattttaatgtttcccttttacattttctaaccaccatcctttaaagaattaaatcagctcattcttacttggcttagactctcttatgctgacctcaatttagtcacagtttccactcagggaataagggtgtccctagcagctgtctaaatacgttaattaaagcagctgtagaaatttcactgtctaataaatggctgcttgccaagcagcaccaaccagaaaagaattaaaatgtaaatcgtgaggttcacacatcaattagaattaaggaaatttagaacaaggtgatattttctcagaaggtttctatctgtggagaggcaagtgtcaaggaacttagtggctagaaatactttctgtgaagtctaagagaaagccctgtccaagccgtgctgggttcctggcaaggatgctgggcactcttgctgtcggctgcatttacagagcttgtcctcataagtgtccaccatcccaaatgatataatggaggaaacatgtctagagaaataccagttgagttcagctttatcatattgctcatccaaagaaaaccaggctttacagactgtggactataatgaaaaaggcttcaatgaggactcagataacctggagatgtcttccatcatttatttgccaattctgaacctcagtgttctcactcttaaaatgaggataataattcctacctagcccacaaagttattattcatataaaatgaaatcaaattaagtaataactttttagacaataaaaagcccccaaaggtaaagcatcattatatcccttattagtaaataagaagcaaacatttaaggatgaaataattgtctctttggggcagctcctttcctccatgcagctgtaaacacaattctctacaagagaagtttatgtaccatttgtccaatactaggcaggaaaaattagagagtgctataatcagccaacttattacattataatatattggtttcacatgccattcattgaccagttttagaaattgattaactgggaggaaaccagagcttcaagtttttgttgttgttgttgtttttttatgttgttccatcaacaggtcattgagaaacagcgtgctgttgttgaatttgaggtcaatgaagacgatgttgatgcccactggtataaagatggcattgaaatcaatttccaagttcaagaacgacacaaatatgtagtggaaagaagaatccaccgaatgtttatctctgagaccagacagagcgatgcaggagaatacacctttgtggcaggaaggaacaggagttctgtcactctctatgtcaatggtatgtagggacagatttcagcatattttgtggatccatcagaaataatcctcctgtttaagtcactaaattcttgtaacttgaaggaaatttctaaagaacctatggtattcatgtggttccagctacattttttttcacattatatctatggaaaagggagggcagctgttaaaagacctattgagaagttattttcagaaagcacctgatggccagatcctcatctggttgctcaaaactattgaacacccattgggtgtccattttcatataccccagatgagcttctagattcgctgttaaactattttagttctctgccctctgcctgaactgctcaagtcctagcagcactaccaagtgaaaggggtgtttccagcctctgatatggagtgcctgggagaactcaaaagtcctctttgagaccctggaaggcctagagagcctcaggcaatgtggaactcgatcctctctaccccaagctctaagaacaggggctcttactttggacagggaattccacatgctaccaagcactcctgaggagcctctgagcagtccccagggaagtgctgttaaacctctgctctcctcattagaaatcttaaggctgaatctcaagctgaccttgttttgagtctaacctagatgcaagagaaaaatggaacctcccttcctattctcatcctaggccatatctctttgaataaaatacccctgaggcagatgcaggaactccaggggtaatctcaagattcacaaagatgaaccatatcgccagcattccctaggttcctagaagaccaaatggtcatggcatccagttcttattatctctgtattagtagtggagaaactgaggcacagaaaagtaaagatcttttctatgatagtgtcagaaaccagcctcacagaagtcatttcttctaatttctgggttccatgaactaaccaggtcccctcactcatcacagcactgagaatatgctttagttagcaaaacaggaaagctgaatttgttaagtctacctaatggcatttaactagatctgaaatagtgttaattcagtcattcattcaatacttactgattgcattttactggcactggtacataacaaaatgactatgacataaacacaaatacttgcaaaacaaacaaactggaatgatatgagcctcttcaccacatgatttgtccaaatgaattttaaaaataggtagcacacggaagttattgtataattcattcaggtgtccatcgctaagcccccaccacaaacagaaactgggataatcaggttaactcggcactctcagcatgccccccaaatatcaaaaatatctttctgaagctattccctctgcatgtggacaaattccaagtgctttcttcattcttagcacaaagaatgttctaatattctgaggcaagtaaaaataccacaattccaaaattttgtctctggatgtataactagccagcaacaaattaatgtagagttttgcatgctctcttgtgtttttacactttttcatgggctatttgtcaacatttactcctagctcctgaaccgccccaagttctgcaggagctccagcctgtcactgtgcagtctggcaagcctgcccgcttctgtgccgtgatatccggaagaccacagcccaaaatttcctggtacaaggaagagcagctgctttccactggcttcaagtgcaaatttcttcatgatgggcaagaatacacgcttttgctaattgaagccttcccagaggatgcggcagtctatacctgtgaagccaagaatgactatggtgttgccacaacatcagcttcactctcagtggaaggtaggaatgcctcgctacttccagctgaaaataaaacctaagaagcaggcttttgtcctttcccagtgcatttaaaaatacaatttggagctcataaaagtagattgctacccaactttgaaagcactctgcagtgaaataaattaagataaacctacatgctcccttctgtgaggtctctatggtgacttaatcatgacaaatcttgtggtttctttctttagttccagaagttgtgtctcctgatcaggaaatgcctgtttatccacctgccatcatcaccccgcttcaggacactgtcacttctgaagggcagccagcccgttttcaatgccgggtttctggaacaggtaggtttaagaacaaaaggtgtcattgccaatacttacaaataattacatgggaaaaacattctgtcagcttctcctccatcacaaacatctctcatgcataatttgaagcttaatggaaatctaacagaaaacttatttcaattattaaattaagaattagataagtgtttttcactattttgtgcccttaataatggttgtttatgttatgttatgtgttctttatcacaataaaaaaattagtgtttttcactaatattaaaaaaggtcatgttccctttatgattgtagctgcactttaatttcttcattgataaaatacaatgacaaaactaaaattattagattataatagcatctacatataattcaaaagaataatacatttatataagacattattcagtctatggacaatgcttgtgtgaaaggtatcctttggaagacaatatcctatagtggtcaaaagtcggggcttcattgtcaaagatgctgaatttgaatcttgccttcaatatatatcatgtctctcgttctccttctgtcatgaatacattgagtatatgattgcattcaatcctagaaaatatattttatgaggctaggaattccgttttagtgcctagaatttggcatctgaaaaatagtacctgctagaaggtaagctctatgaaaacaagagtggatggttgccccagaatatcacctgatacatagtagatactccataagtaattgttgactggactaattaatgatggttaaatgactgttaccaaacacttaagattattatcaagattaagttaggtaactcaagtcagcacatagcacagtgctcatcatacagtaatcaatcagagttagctgctaccatttttaattggggcatgcttctcaagtaccaccagccaatttcctcatcccaggaatctgatcttggtagaatgagacaatatatgtggaaccacttcaagtcataactgattgtctataatcacaattatttgagagtttcccagccaaagggaaactctcaaagcttgggcatctcccagccctcttattaggctgatgcaaaagtaattgcaaagttgtattgttttgtttattatgcttctcccattagtttataatccaatctctaccttgtcaagatttatttttctcaacaggttagtacttcagttggtcttctgacccaattatttcctcctcaggaatggagatggtgatctagaaatctaatagacctatttgattttatgagcataattaaaagatataatgtatgtaaagcacctataggcatggctgccaggtaactggggctcaatacattcattttattatagccatagagaggaattatataaacatcaatgtttagtattgtatggccagtatggacaaataccatagactgtatatttgagggatagtgttcaagaaatgctaaatattaataaatgaggactgatttgataatatcctactaacacaataatacaaaatatattttaaaagcaagttcattaaagctacactaaataatttatccatttatttaatttttagaggaattttttaatataaacatatatgtacatcattcaaagtagtaatatttgtcttaactatattggtatagtgcttttaagtctataacatattaacatatggtagtattgcctttaaagtgttgtagaaatacacctgaagcactctacaagacaccaattggggtagaaagagaaaaatttcactatcttttctgcataaccaatgtctttaaaaaggtttgaataggctttgtaaactgagaagatcattaacttcctatgtgtggtaatatctgtacacatatagtggttttagcatcctcttataaatttgttttctatatgaaagaaattaaattcattaaatagaatgacccttcaaaaacttgccaactcacatagtttcataccactgggactaaaaatatttacagaacttcctctggccaggtattgccttaagtaagtgtagccctgctttccacaaattggaaagaaattgggagtcttcagaagctcccatgttcttgggggttgtaatactttctgaagcatgaaacgtggccctgagcaaccaggtgctgtttctaacagcgaaaatgttacctattgaaggtctccagtgccacctactggtagaggagtaatttggaaaagcagaatcttaaaatgtaaaaaagctatttttttgctgtttattctacagatgatgagtcagtgtcatttggaggcttacagagtgacagctagctaaacagaaatgatgaataattagtttaacaatgatattgtctgttattcatttaagcatctgtgcaattttaattctaccatttattgtttccctgctattgagatattaccctaggtgctggggtgcagatcttgctcttgcctttaaggagcttgacatgtaggtgaggagatgcatgcacacaactatatcccaaggttgtaagtgctattaacaggcccacgtactcatcattctctgtctgggagagagccagagaaagatgtgtgaactgagcattgaaaaatatgtaggatcattgaacacagtggcatcctatgatgagaaaacaacatctccaagtcatcaaaacttgcaataatgcttcatgtgctagaagcaagtggtttaagtacagttggaaagtgatatcatgagtgggtaagaaggctggataatacagcaaaggccgtgctaaagtttttggtattctatgctgaagattttggaattgatcttgtttacatttaggagacactgcaggatttttaagcccctgggtaccatgatcaggtttactttttagaagtgatactgtgatagggaaagaagggatggacagatgtgggaggcaagactggcagtcaggaactggagagagattattacaataggcctggagagcgtggatgaggccctcagccagggcagtcaggagagacaagtggggtattgcagaagtagtaatatgggagaagaatggcctcaaagaagacacgagaggctaatgagtaacgcagatcatggcatcacagccacaagcaccaagtccactaccaagaaaagttttacctgttaactcacttattgtgtgcagttcatgtccagtggcagttcatgtgtatcctggtgcctcattcagttcaccaaaggaagaagctgtcagtagaaataagcagagaaccttgtaagaggatgtaccattgatgatctcacacacacacacacacacacacacacacacacacaccccttcacacaaactaaataggggtggtgtttcatgttatatcacatggcactgtcttttggcgtgttattgaagacaacgttgcttccatctgtgatgttagatattcttgctataatgactgacttgtgccagtggcttataaagcccttccatgtgtgttatatcatttaattctcacagcaattatatgcaacgaatagcccataaattattacgcatgccattttacaaatgaaaagactaatccagaaagcttaaatgacatttccaaggccacacagctgacaagttgtagtgtcaagatttcattttctttatatgtatatattttgatggagtcttgctctgtcaccaggctggagatctcggctcactgcaacctccccctcccgggttcaagctattctcctgcctgagcctcctgaatagctgggattataggtgtgtgccaccacacctggctaatttttgtattttcaggagagactaggtttcaccacgttcgtcaggctgttctcgaactcctgacctcgtgatctgcccgcctcagcctcccaaagtgctgggattacaggtgtgaagcaccgcgcctggccaggatttcatcttctactttaccttactatctaaggaactgaacagatttgttactctaagaggagaacctgccatttatacacatctaccatcatgggcaggagagtaacttttatagacaagtattggcattaaaatgcagacaaatgctagatgattggactattagaagatcatcttggatggttttgagaccaagaagtggtatagtgactgtgctccaaaaacaagatggctttgattttggctattcaaacagttaactaaaattaaagtgcatatcacctacaattattacaacacaataacctgctactttactgtaatttgggtttttactttctattattttaagatggttcaaatccttatatagaaatagctagctttattataatgtcttataactgccactctgaaaagagtcaaatgtatctaagatgctcaaataccataataaatcaccctctttatttaaaaaattattttctctacaattatttgtgccatatatactgcgtactgaaaccttttgctcattagtaacaaagatagagattttttttctacagccttcaaaggtatctattttagacttttcatatcttgatcttctcagctctctttttgattgatttttctgcaaaccaaaagtggagatttttctcatttcctgtcccagaaggcaactacaagcccagatcaaacctttcctgatgactcttcttaggactgtctttttctcaaagtcactgaatatgtcaaaatcttgtctctgcttccactgcatgacatgcaaatgtctaaagagaatgtaactgaagttctatcattttaaacattacaaccagttcaaccttaggacaagctatatttttctatcattacatttccttcttgaagatgaaaggaaatcatttaacaatagtagatatggcatgcccagagaaaagtatcatgttattaagtcaaatatgaaatgtaggcactagtattattaacattgtgtttgcaggtaaattgtaaaaatccactcatttttgtggttgaagtatctcttttcttttgtgtcgcagatctaaaagtgtcgtggtacagcaaagacaagaaaatcaagccatctcggttctttagaatgactcaatttgaagacacttatcaactggaaattgccgaagcttatccagaagatgaaggaacttacacgtttgttgctagtaatgctgtaggccaagtatcaagcacagccaacctgagtctggaaggtaaagtaaaacaactttcagaaccccatttaaatatagatcgaatcttaacaatgtctgtaacaattactcaagagttcatgtaaatcattgttgttcctaccattctcttctaattcaactaattatttccctgttatatgccatggtctcgcctctcctttaccacttttcattgtgaatcatagaccatcacgtttcatttggccccgctttttctctgtaacaatttgtaatgtattgctgctgtcaccagctgtcatgcttcctaatcagcatgaatcagaagggggcgaaatatgctgcataaataggtagatttgttttctcaattggctaagataaaaattaaattttaaaaacatctaagagtgttatcatcctcctatcatgctgacacaattttgatttcacaaaagctagaccgtttcaggtctgtacaccagcgagctatattcatcctcctctcaagaatgtcttagtgttaagaagtccagtcctaaagtggtttaacatttctgttagttggggctcttaaattgtaatcagaaacacttcctcagtaacatggggaatttgattcaaacaaggatagcatttttatatagtggtactatttttcctgagcaaatatagtctatgtagtattaagtacatacaaatacataaggatttagagaaactatttttttcttaaccttatgcattaactgtaactagatgtttttttaaataatgaatttaaagtggtttaaaattaaaaagttgactttacaacaagaggaagaaagaaaagaatatccaaaaccctgttgggtactccactattgccttcatgaacaatgtagtgaagttccttagcccattcatgtctcagcttgcttctctgggaaatggaagtgaacttgtgtgacttcgagtcaatagtgacatacaaggacaaggcagtaggagtggactgaattctagtccattattgaaatttgtgacaaatctgtagacaactccaaatgagttctggtttcagtgcaaggtaagacattaaaaattggtatgcttcttttcaggatttagcaaatttgaagaaaatacatcaaactcccaatggcatgtctctttatcagtttcatttaagaaggagccccttggccaaaagcccagcttcatccagcctctgtcaagcctcagggtgcacaacggggagacagtcagatttcatgcgagggtttctggcattcccaagccagaaatccaatggtttcataaccagcagctaattctaccaacaaaagatgtagttttccattttgaggagtccacaggcatggctttaatgcttatagttgatgcttactcagagcatgctgggcagtactcttgcaaagcagccaatagtgctggggaagccacttgtgcagctacactcacagtgactccaaaaggtaaagcccatcttgcttcaaggactttgatttgctgtatacctctcagtcccactgttactaatgagagtctctgctgtttgttttattgcatactgtggtcagtccataacttactaataaaataacatgcaataactcccgctaggtcctcaattatgggttaacctacatactttaaatttcactgaagtatgtgttctatgcactagagaaccaataattattttattaggcaccacctttgcttggcttctttactcttctaagcaatattgtatcattgcatcattaaatgatctatttgctgattattacttactgtacttaaagtaagtacagtattacttactgtacttaaagtaagtacagtattacttactgtacttaaagcatacagtggacggagagcaaatgctaacccaaatacagtcagctagagggagagagagaaagacagactgggtcactttggatagctgaaatgacaacagaaagaaggaaccagatactgcatggcatctgcatgagtcttcatcaaccactcagcactgaatcaccaggaatgaattttcttttgtgtgatcctgacatctagatcatattgcatctggcatgctgctttcaagtgacaactacgtctttcatcttcatcttccatgccattttgtgttactaacatgggcaagtgacaaagcttagatcttaatattcttttctttttcttgtcacttgattatacagtgcaagccctagataggcaaagttctgggaaagatgtaagagagtccgccaagtcccaggcagtggcagattcctctttcacaaaggaggagagcaaaatatctcaaaaggaaattaagtcatttcaaggatcatcatatgaatatgaagtgcaggtttttgaaagtgtatctcaaagttccatccacacagctgcatctgttcaagatacacagttgtgccatactgcatccctttcacaaattgcagaaagcactgagctatctaaggaatgtgctaaagagtccacgggtgaggcgcccaagattttcctgcatcttcaggacgtcactgtaaagtgcggtgacacggctcaattcctctgtgttttaaaagatgattctttcattgatgtaacctggactcacgaaggtgcaaagatagaggaatccgagagactgaaacaatcacaaaatggaaatattcagtttcttaccatatgtaatgttcagctggtagaccaaggactatacagctgcattgtacacaatgactgtggagagaggacaacgtcagcagtactaagtgtagaaggtggttaattgatttttagctatgacttgcttcatttcatcctcatcgctttatgcagcttttctgccatgcaaattcaatcgacgaatatattaattagaatatctctaaattagcaccctattcataagtgacttctgaaagtcagccaagtcattggccatgattatcctgaaaatttaacttaccagtctagattcagaaagtttaatttttaaacgtaggttcgggaagcaaaggtttatttcctatgtgctgcattttctaatatttaccaacgcactaccaagaaagtgtagcaaagttaaaatgttgtattctgagaagtacttattgggtatttattattgtgccagatactgtggtaaatttcagtttaattgttttaatagcaagaggttcaacaattcttatctcctctttattttcacatctggaggttctagttgtttacaaaggggccatgaaaatagaaaattgggaccaagtacagtgactcatgcctgtaatcccagcactttgggaggccgaggcagccagatcacttgaggtcaggagtttgagaccagcctggctaatatggtgaaaccccatctctactaaaaatacaaaaattagccaggcatgttggatgttggtgcatgcctgtaatcccaactactcaggaggctgaggccaggagaatcgcttgaacccaggaggcagaggttgcagtgagccgaaatagggtcactgtactccagcctgggcaacagaactagactccatctccaaaaaagaaaaatagaaaattgaaaattgggcactgaaaataacaaagctctctctggaccaaaattagaagtctctagatatttctccataaatgatgctgcttttacaggcttaaaatcctcctggaattgtataattttctcatggcaagatcacaatttttgtcgttattgggcttgattctccattatgtctggaagagcaggaataaacttgtctgggcaagtaataacttcttcctcttatccatggactttccttttggatattaatgaaatgagaaaaatatttttcaggtgccataagcctgtgttgtgtgcccgtagtcaaaacagcttcactgagtctcatggaaggaagctggtggaataaattcaggcatctccaggggtctgtggaaagctctggcctcaagttcctccctgatcctggccatagtggtgttagggatgaaaagggggcaatgcagtgctatgtaggtgcacagccatctctgcacagaattttgaaacagtggcctttcttcctacccagtacagagaatacagtttattgattcatataatgtatccgcaacacctactcaccaaaaagaggtcttattctttcttaatgagattttgttctatagctatctctcattctgtcaccgtagcctacaaaggcaatatctcaagaactgaggtctagttatgtaaattagatagaaaattccaccagccagagagttgaccctcaatttcactacagctgctggctagcacagtaatcacacagagtcactatttatttggaggtgttgtctacaagtcctgtaggtgacagtgtgacaattttttcagtaatgtaattgggagttggctgtgttgtgaaggtgggagaaatgtagatctcttaactcacttcctaaagaatctagtgctatagtgcggtgtttgactgtcatattcccagaattgatttgaactcggctcttttgccctaggatctccagttcattcagttccaattgataatattattaaagtgttcttgaagcaaaagaatttttttgaacatccaactgccttacttgtacctaagaaagttgaaagataagacatttttagatgtttgaagagtgaaagatcaggcacagttgtctaattatttgacataggccagtctttatatgttccttttttattttggcttaataagttcatataggctacagagttatccaccaagatcaagtaggaatgtcaaacccctggaagtctttttgaatacagttattatgtgcataataaacataaacatatcatatataagtttcatgactaacatgctgcctttccttctcatcctaatgacattccatcttctccacattcagcatgtttttcattcttacaaacacagctaatttatgcctttccctaactttattcttacctagcaaaagaatcgcaagccagagcacttacaaaaattactctgggttctgacactaaaagtattaaaacactcagagagtcacaaattaaaacaacccgtgaagtaaaaagagaatcgtcaaagaaaacatcaagtttgtcattaacttcatgccaaaaaccgtaagaaactgagaacaagggaataaagtctactgacaggataccacgtggactgaagactgagagtgatacgagagccccagcctttcccaaggagctgccctagatatgactgtgtctaaaagctgtgcatattccttgtggaataaaaacagttttgataagtctttgttttgtttcttaatatgtaatttggacttcatgtagttcaaagtttgaaaggtgattcaaatcaaaggagtgtttactagcaggaaaaactgagaatagccctctgctaaagtagcaatttagaaaatgcatgttctttctaaatgtgatttcatctcttagcaagtgtttagtcaataggacattttttagaaaataatattccttcggtttgtagattgctttctgcatgcatgtaaaggcatggggaattatagaactaaaagtggaaatttcatgaagaacctaaaataaaaatgttttaaatctttctgtcaacattgtcatgtgttttatcagctcaatagtttgtttggcatggactttttggtaaatttggggaatgtagttttctgttgttataataaaaagaaaactttaatcatacaagtcatgaattgatgcagaaaatatatgcaattaatcactaaaatctctttatatgtttttctattttagctcctgaatcaattttgcatgagaggattgaacaagagattgagatggaaatgaaaggtattgttataatggatgtgagatttaagtagaaattctaaaggattaataggatccttgagttgccttctttctcttagtattattgagaaaaaaatgacatagatatacaaatatatctcttagagtatatattactatgtcgcatgcttggtttagaattttgatggttacatgcatttcacagtaatttattgtaagttaatttaaaattttgtatttaaaatttatcagccaaattcaactttatgtttgcagtcatttccaaaagtgtatattaggagaagttgtcatcttaatgcatgaaatcatgaagtagaagtttgttttcaaaatcacggtgaattacattgaaaatagacaataacctagctgtcattctcagaatgcaatgtcatgaatgaattatgattgaaatgctactttactgaggttgtgtgaaaacattacattcccatctggtttacacttcattcacatatatcattttaacattgatatgtctcttacactggcttgcagatagctgccttatgtgatccttattgcctgcttttctttgcataacattgtgactttatggctgtattagttcgaataaacgccttctcattttattttagctaattatttatggttatagttcttgtatatactctttaaatagttgattctcaaaaatataataatttaatctacaatcaaaagaatcagaaagggcgtttattccactctctgcaagtcaggtaagattttccacttagccatcaaaagaacaaagttttcctgctctcaaaacaaatatgcacaggaacatgttattttgaaatgcatttttgcttgttcaagaagaaatttcaacagtttgaagaaaagaccagacaacgaacgattttcgtgtcagaatcttttaaacagagcatggtgttgcgtttattcgaacaaatatggtgagtgaatttttctatggatttgtgagatctgtagcatgcaatttatttcatttcctattttgcaattttatttactttcaactttttcaagttctatggaaaatagtaaaggtttttttttttttttccagaattattctctgagggggaatctgaacattcagaaagggatacacgtgacgccttttcagattctgaagacatagaccacaaatccatggctgctaaaagatatgcaagtagaatatcatctacaagctcctggcctgaatattttaagccttcttttacccagaaacttacatttaaatatgttttagagggtgaaccggttgtttttacatgtagattaattgcctgtccaactccagaaatgacttggtttcataacaatcggcccatcccaacaggtcttcgtcggattataaaagctgagagtgatttacaccatcactcttccagcttagagattaaaagggtccaagacagagattctggaagttataggttactagcaattaatagtgaagggtctgcagaatcaactgcatcattgcttgttatccaaaaagggcaagatgagaaatatttagaatttctgaaaagagcagaacggacacatgaaaatgtggaggctttagttgaaaggggagaagataggataaaggttgacctgaggtttactggctctccctttaacaaaaaacaagatgtggaacaaaagggaatgatgagaactatacattttaagacaatgagttctgccaagaaaacagattacatgtatgatgaagaatatttagaaagtaaatctgacataagaggttggcttaatgtaggtgaaagtttcctggacaaggagaccaaagtgaagttgcaacgtttaagggaggctagaaaaacattaatggagaaaaagaaattatctcttttagatacgtcttctgaaataagctcaagaactttgagaagtgaagctagtgataaagatattctgttctctagagaggacatgaaaatcagatctatgtctgatctagctgaaagttataaggtagatcattcagctgagagtattgtgcaaaatccacatgccctttctaatcaaatggatcaaaatatagaatctgaggaacttcccacaagctttcaaactattgttgatgaagaaattttccagactgaaataagaatgagccaagaagcactggtaaaggaaagtctaccaaaagaccatttatatggtgaaattctagtaaatgaaaatacccaagcaagaggacagctggaagaaattatggccaatactacaattggagagtcatccacatatatcactaatgtatgtgagaaggaggaagtatatgagactcctgaaaatgtgtctcaagctattacaccacatgccagcgaatcttttggtacacttgtaaatgttgaagaaagtgaagaaatagctagtgaaagaataaaaaaggatgatttgagagaattacaactctctgcttctacacgaattgatgaattcaaaaccgaacagaaggaagaaaacatgagattttttgaaaattcttttcgaaaacgcccacaacgttgcccaccttcatttcttcaagaaattgaatctcaagaagtttatgaaggtgacagttgtaattttgtgtgtcattttcaaggatatcctcaacctatagtgacgtggtataacaatgacatgccaatcccacgtaatcaaaactttatcattcattcgttggaaaactattcaatattaactctttcatctgttcatcatcagaatgaaggttctattacttgtgtgctatttaaccaatatggaacagtaaaaacaaccagtatgcttaaagtgaaagcaaaacaaaaacatgatgtcaaagcacataaagtcccagtgttccatgactacttggatgaggaagaagagttagcattggtgtttgaccaagcaaaaggcgcccatccatctatgagtcaagagggccaaacaaatcttcatttgttaaaaactaacccaccagttcctccctctggagacacagaattgctttcctttcctgtagaaattcaggtaacagcagctactcctatcccagaacaggataaagagtctaaagaagtgtttcaaactgaggagctggaacctaaagcaatgcctcaagatcaagttactcaatcaccaaaacacagatttgtatttttgtctgatattactaatgaaccaccaaaaatgttacaagaaatgccaaagcatgccaggtgtagagaaggggattccatcattcttgaatgtttaatatctggtgagccccagccagttgtaacatggtttcaaaatggagtccttttaaagcagaaccagaagtttcagtttgaagaagttaattgtagccaccaattatatattaaggatgttaattctcaagattctggaaaatataaatgtgttgctgaaaacaattcaggggcagttgaaagtgtttcagatctaacagtggagcctgtcacttatagagaaaatagtcaattcgaaaatattggtgaaatttatggaaaatattccagagatcagcaactgcaagaccagggagaatctgtaagggcacatttttatgattatccagctggtccctttactccctggacaaatgtaaaagaatattcagtaagggactattttcaaagccttgagactattgagcaaatagaccagaaagagcaggtgcgttgcataccttctagagaaaaaattcccagatttgtgcatggtgcttcaagaaccataaaaatcagcaagcccatcagggctgaattcatacaatgtcaggctgaagggaaagagagacatgtaagtgaaaaatcaaagctgcaccaagcagagggtactgtttatccatttgttgatgatttcagtgatgtcactattaagaaagaaataagaaataattttggaaaacttggtagatcagaaaaggaaaatgtacaagaatgtgcccaaagtgactatttaccaaatattcactctgagagaatttctgacagttacaatacaaaagattcatctgccattgtatatgaagaatcccttggtgaagagatacactacccggggaaaaaggtgaagcatagaattatcgaatttgaaaaattacatgtagaaaaaggagttctagaaaaaagacctaccagaacatcaattgttaatcctcctcaaaagaagattgatgacaaagccttttcattaaagcaaagagaatcaagatcaagcaatctaaatgcaaatatgtatcaggcagagaaaatgtctccaaatactgaatcagattcatctaacattgcaataaatttaaagctgctttcctctcaaactcataaagaatttgacgcacaagaaagggaacaacaggaaaaaataagtcttatagataaacctgcaatttctaaaagagctgaacatgaatcacctattacatttgacttaaagcagtttcacactcaaataaaacacacagatgtgaaattccaagaattagatagtggtcaaccagaagaagcttattttaaaatccaacatcctgctgacactgagaacattgtatttgatctaaaacaaatgtattctcatataggagatccagctctggagttccaagggcaagaaactagggaacagcaggaaatacattataaagaaaaaattcctagccctgaaacgttacaacctgacacacacaatatctctaaaagtgtgcaaaataatgtatttgccagtcaagaaatttcttccagtcaagagctttcaaatagaactatggtggagaaaagtagtattgatgaaaattccatttctttagaaaaagaagtccgacatgtacaggaacaaaacttagacattttaaaaactgatctttctcttaaatccttttctgaagaaatctatagtgaatcatgtgccctacttccaacctcatctgcagatatagaagaaactgatctttctgagaaaagttgtcctctagaaaatggaggcagaagttccatctcacatttgaaaaaagcagcaagtgaggaaaagcctttaggggttggtgaaatggaagaagaatgcactctagaaccagagttggcagcatttccaaagcaggatggtgggacacaggaatatacagatgccactttggaagaccacagaggtgatgttcaggaagctgacacactccatagacagctctccctgagtcagtgcttcccactcttgatgactgaagaacaacagaatccaggtgaacaaataagtacaaacattcatgcctctggagaagaaaaatgttatgaagaagttcaagttcagaatgaagcttctttctccactttagaaggagaaatgatagaaactagtttttctcaaaatattcctaaattagatgaggcacataccactgaggcagcagaatctgagacctccctaacacaatatttacttgctgctggaaagcgtgaggttcctgaaactaaagacaccagagaccaggcaaagcttgtccagagtgaatcaatcacttcaatggaggtggaagaagtaactttcaacactgtgtatgaatactacaaccagaaacaggaatcactaggtcgtccactttctcctgagtctgacatttccattggtgtgggaagtacaaccagtgaagaaatatctgagttagatcagttttataccccaccatcatctgttgaatattttgaatctccaaagtcccctgacttatattttaatccttcagatataactaaacaatcctcaatacattcaggaggtgagacagttgaaagatattccacacctttaggggaagttgctgaaagatattcaacaccttccgaaggtgaggtaggagaaagatactccacacccccaggggagacactagagagatactccacacctccaggagagactctagagagatactccacacccccaggagagactctagagagatattccacacccccaggagagactctggagagatactccacacccccaggagagactctagagcgatattccacacccccaggggaggcactagagagatattctattcctactggaggaccaaaccccactggtacttttaaaacatatccatcaaaaatagaaagggaagacggtacaccaaatgagcatttctacacacctacagaagagaggggttcagcttatgaaatatggcgttccgattcatttggtacacccaatgaagccattgagccaaaagacaatgaaatgcctccatcttttattgaacctctgaccaaaaggaaggtatatgaaaacacaacactaggcttcattgttgaagttgaaggtcttccagttcctggtgtgaaatggtatcgaaataaatctttactagagccagatgaaagaatcaaaatggaaagagtgggtaatgtgtgttcactggaaatttctaacattcaaaaaggagaagggggagagtacatgtgtcatgctgtaaacatcataggggaagcaaagagctttgcaaatgtagacataatgccccaggaagaaagagtggtggcactaccacctccagtaacacatcagcatgtcatggagtttgatttggaacacaccacatcatcaagaacaccttctcctcaagaaattgtcctggaagttgaattaagtgaaaaagacgttaaagaatttgagaagcaggtgaaaatagtgacagttcccgaatttactcctgaccataaaagtatgattgtgagtctagatgttcttccatttaattttgtagatccaaatatggattcaagggagggagaagacaaagaactaaaaattgatttagaagtatttgaaatgcctcctcgctttataatgcctatttgtgattttaaaattccagaaaattcagatgctgtattcaaatgttcagtcatagggatcccgactcccgaagttaagtggtataaagaatatatgtgtattgagccagataatattaaatacgtgattagcgaggagaagggaagtcacactcttaaaattcgaaatgtctgtctttctgatagtgcaacatacaggtgcagagctgtgaattgtgtaggagaggctatctgtcggggattcctcaccatgggagattctgaaatatttgctgtgatagcaaagaaaagcaaagtgactttaagcagtttaatggaagaattggtcttaaagagcaactacacagacagtttttttgaatttcaggtggtggaagggcctcccaggtttatcaaaggtatttctgactgttatgcaccaataggtacagcagcatattttcagtgcttagttcgtggctctccaagacccacggtttactggtacaaagatggaaaattagtccaaggaagaaggttcactgttgaggaaagtggcacagggttccataacctgtttataacaagcttagtaaagagtgatgaaggagagtataggtgtgtagctacaaacaaatcaggaatggctgagagctttgcagcactcaccttaacttaaaatgtaatgttttagtgcctcagtaattattagcattgatctgagtgctttcatattttccaaattatgtggatctaataaacttccaaacaggtccaccatatttgaattcattaccttggagacccctaaagaaataatctctatgtagaaatctcatctttgtaatacatgtaaatattttgttatctgaactgtggaatcatcacttgtgtcaatcatgctgtgtaatatcaaacacaattaaatctctccttggctacctaattgtttgtacttctatttaccctcatgcctcctccacaaagtgtttcagtggaatggactctcttttagcagataaaccatatatgcaaaagtacaatgtaaaagtggagaccatatcagatgaccacgcagacaaattggtaagggcaaatctctctgctcccattctaagttatttttggaattttaacccctttgcatccaaactcatgtttatttactttgacttagaataggcaaaacaaacaacaaaaaccagcttctcccaattggcaactaactctataatctgtttgacatttcaatcttaatatattaacttcatctcttttaaaaatgttttcgttattaatattcctcttcataagtgctttaattctcactggcttcaagggaccaattgtgctctttgtgggcagggttcacctagacatttgcaaaataagcaaatagatctttccacttttggagataccttatttttctccatttttgagatgacatcaagtgtaaaatgcagcaataatttagtattggcctggggaaaaaagggaaactatcatattgtgtttacatatagattttaaaactgtattctgatttcagaatctttaaaatttaaaaaaaggtgggatatttttagaattgagacaatatggtaatttgtatttcagattatatataaataacaagataacaagctttcctatcagtttcactgaatttcatctttaaaacgaatatagcttaataagcattcaatttttattgtgatgtttatgtttctaaagtaactctttaattttgtcttttaaaattaaaataacagtaaattaacatactccttaatatcttacctatatactaatgtggacccaagtcttctcatataagactcgacaaatataaaaaattctgaaaatgaagggtaggaccaaaagaccttagaggtgatcattcaacaatacaattctgtgttaagctaatagtaattattcttaatacaatttagaataaactttaattttgtaacaaaggacgagagaaataatattacaatgaaagataaattttatctccctccacctcttaaattacttattgttacttaatggctacatttgtcacctgcatttagcaatatttaagtaccattatcatatttaaaatgctaattttaattagaaatgtaaacaatttaaatttaattttcaaaagaattcatatccaattatgtttattatgtttctttcatctatcagtctttattctcaacatgggaattctctaacagctatccaaattaaagaagcaatagagacaatgtacagaaaataggcagagcagccaggcctcccctgcctccctcacaaaaaaaattttgaattatctgtttgagccaccataactcatcagcatagatacactattgtagaacaatcattcctgttccaaccagtgagcacacaatatctgtgataataattatagacataatgtaatatatcacatcacaaattcctgaaataaaactaattctatagattaggaacttagagatttattctgcacttagtcacataatggatgttaaaattaacgagaaactcagattgaggcaaacatgacaagcatgctttactcaaacatcatacagcacagcaacagttcaaaccttgtttcttaaaaaaagagaaagagagaaatagaaaaatgtttttatgtcctactggatttcaggaagagctgaaaaacactcttattcatatagtaaagagggctttgtttggttttgctcattagaattctgtaattctgttagtttcaagtatggtgagcttgagtatacgcagaataacagtgactgaataaagaaaagtaagccttggcttactttaattgtcatagataatgaaatggaattttttattttctgactcaatggcacgtaacataaaaccccaaaatattaatttctctgattctggataaagaatttattgtattgcacatagttgagtttagacaattaatagctgctaccacaacatgtaattttttaaactatgcctttcaagtttcagcacatttgaatttcatttactatcctttttatggctaataataccatggcttgaagtaaaatatttgcaaatagttcaacatagtagtgagtaagggtattttaactgtattcacattcactccctttacagatattttgtgagttcaagtgaagggaaaggtaacgcgaattatgtattgtagattaaatgcgaagttaagtgatcaccattaatatgtaaaattatcaatggttttatggtttacttaaaataataaatacctgaatatgtattctgcatgctatagatgagtttctccagtatttttacagccagcagacacttgagtcctgtcttctaatgcttatatgctagaacagaaaggaattaaggtgtaagtctatttcatgtgatgcaagtgaagtcaccaaataaaatcataaaactgccttttgctaaggcaataaaactactaataacaggcctgttctacatagctaagaggtttaataaaaaatcgaattccttgtttaaaattacatgtctttcatcctgtcatccaggatactgtttaaagagtctctgttatgcactgctttgtttcttgctcagtggttctgtataggttttcttatacaataaaatacaatgaacttttaatattggagttgttttctcttatttttgattatcttattttcttggctaatgccttattacaaaggctttgttcaagtaatatggtgatttacatagatgaaagaaggcctgcatttctagaaactgaaaacagtggttctcttacaaatccaaattaaacatttcctgtagcctcttatttttaataatgactttagaggcagtaattagaacatcaatggtttattttggaaataatcagtctttaacaaagaagattattcttaacctcaagaaaactctaaatataaataacaattctggatctttttagaagttgatttaaataatgctggattattataactatttaattagcagtttttcaaactttaaaattggaattatatctcaagaaaaactcatgagagcatttttaaaacatgaactctatcacagatgaagtggatcaaaaattgcttttgtacagtatctataattttgcataattttatatgttaagctaagaaaaatttagaaatgtgctttttgatacattaatcttggaataatctaatcattccaggaataaagcagaagaaggccatcaactggtgtctaattctttgatttctatttttatattaaataaaattttatagtaaaataataatcatttttccccatacagagttttctagttcttttctgtctgccgaggaagaaggacttcatagcgccgaacttcaattatctaaaataaatgaaacacttgaacttttgtctgaatctccagtttacccaactaaatttgattccgaaaaggaaggcactggcccaattttcatcaaagaagtgtcaaatgctgatataagcatgggggatgtggctacactgtctgtaactgtcattggcatccccaaacctaaaattcagtggttctttaatggagtgctattaaccccttctgctgactacaaatttgtttttgacggtgatgatcatagcctgatcattctgttcaccaaattggaggatgagggagagtatacatgtatggccagtaatgactatggaaagacaatatgtagtgcctatctaaaaattaattccaaaggagagggtcacaaagacactgaaacagaatcagcagtggcaaaatctctggaaaagctgggaggtccttgtcctcctcacttccttaaggagttaaaaccaattcgctgtgctcaagggcttcctgccatctttgagtacacagtggttggagagcctgcccctactgttacatggttcaaagaaaacaagcagctttgcaccagtgtttattacactatcattcataaccctaatggctctggaactttcattgtcaatgaccctcagagggaagacagtggcctctatatctgtaaagcagagaatatgttgggtgagtccacctgtgcagcagagctgcttgtgcttctggaagacacagacatgactgataccccctgcaaagcaaagtccacaccagaggctcctgaggattttccacagacacccttaaagggtcccgcagttgaagcacttgactcagagcaggaaattgcaacgtttgtaaaagacaccattttgaaagctgctttaattacagaagaaaaccagcaactatcttatgagcatattgctaaagccaatgaattgagcagtcagcttcctttgggagctcaggaattgcaatccattttggagcaagacaagctcactcctgaaagcaccagggaatttctttgcatcaatggcagtattcactttcagcctctcaaggaaccatctcccaacctacagctgcagattgtacagtcccagaaaaccttctccaaagaaggtattctaatgcctgaagagcctgagacacaggcagttctatcagataccgagaaaatcttcccaagtgccatgtccatagaacaaattaattcattaacagttgagcctctgaaaactttattagctgaacctgaagggaattatccacagtcttcaatagaacctccaatgcattcttatctaacctctgtggctgaggaagtactttcaccaaaagaaaagacagtatctgacaccaacagagagcaaagagtgactcttcaaaagcaagaggcacaaagtgcgctcatcttgagtcagagcttagctgagggacacgtggagagtctccagagtcctgatgtcatgatctctcaggtaaactatgagcccctagtcccttcagaacactcatgcacagaaggaggtaaaattttgatagaaagtgcaaatccactggaaaatgcagggcaagattctgcggtcagaattgaggaaggcaagtccttaagatttccactagcacttgaagaaaagcaggtactgctcaaagaagagcattctgacaacgtggtgatgcccccagaccaaatcattgagtctaaaagagagcccgtggcaataaagaaagtgcaggaggtacagggaagggaccttctttctaaggaaagcttgctttctggtattccagaagagcagagattaaacctgaaaattcaaatctgccgggctttgcaagcagccgtggccagcgagcagccaggtcttttctctgagtggctaagaaatattgaaaaggtggaggtcgaggctgtaaacatcacccaagagcccagacacatcatgtgcatgtaccttgttacttcggcaaagtctgtaacagaagaagtaaccatcattattgaagatgttgatcctcaaatggctaacctgaaaatggaacttagggatgctttgtgtgctattatatatgaggaaatagacatcctaacagctgagggtcctagaattcagcaaggagccaaaacaagtttgcaagaagaaatggattctttttcaggttcacagaaggttgaacccattactgaaccagaagttgaatctaaatatctgatctcaactgaagaggtcagttattttaacgtgcaaagtagggttaaatatttggatgccacacctgtcactaaaggggttgcttcagctgttgtctctgacgaaaaacaagatgagagtctgaaaccatcagaggaaaaagaggagtcttcctctgaaagtggtactgaggaggttgctacagtaaagatacaggaagctgagggtggcttaatcaaagaggatggccccatgatacatacacctttagtggacactgtttctgaggaaggtgatattgtacacctcacaacatccataacaaatgctaaagaggtgaattggtattttgagaataaactggtgccttcagatgaaaagttcaagtgtttacaagatcaaaatacatatacgctagtcatcgacaaagtaaataccgaagaccatcaaggagagtatgtctgtgaggccttgaatgacagcggaaaaacagcaacttcagccaaactcactgtagtaaaaagaggttggattttaaggataaaatagatcaaatgctaacattcactggattgtaatgatttagcttgcatcacttaaattttcacttatctgccacttccagaatgtaatttatttagagtaagaatgaaatcacagacataatcatggttatgaactcaccttttcccttactgccctgttgggtgctatgctatcatatccatggtactatttattttaaaaataaaacatattttcatatgtttcataataccaatagataagcttttagttaattttcatatgaagataactttcataatatgtaataaaaagtatcagtgaacacctagccactctgaaatcactggtctcacccttagatttaaaataaccatgattagttgtctgtttcttttttctgtttattttttgttgttgtttcacttcatcactttatttagtatatcatgtttcttcacattattttcagtgttcccattcagcatggtatatttaaagaatatatcatgttgttatgcatataatccaatagcatcacattttttcacaattcactgcaaagcaatgattgaataggttttttttaaaaaaagcttattgtcttcttttgccttcaatgatctttctcattttccagtcacttgccttaaactgctgtaatccatctcaccaatttcaactgttttactccattaacagcaacaaaagttagaagaaaaacaaaaatgtcatatgcctgataaggaggcatgttaatggactctacttccctttgcagctgccccagtgatcaagaggaaaatcgaacccctggaagtagcactgggccacctagccaaattcacctgtgagatccaaagtgctcccaatgtccggttccagtggtttaaagctggccgagaaatttatgagagtgacaagtgttctattcgatcttcaaagtatatctccagccttgaaatcctgagaacccaggtggttgactgcggcgagtatacatgcaaagcttccaatgagtatggcagtgtcagctgtacagccacactaactgtgacaggtaaatgccatacattggcacagatgttgtcacttcatttcatattgttgtcctttttgctttctgtacatgtgtgggaaatgcttgtattaccaactggagagaccaacaaccaagacagtaacatggtaggtaggtactgcagagcctatatgggataagaaatcattatttacagtcacatttctactactgaccaaagaaaaaataatttattatttgagaacaaagttaagtaatcaaatgagctcagcttggcccttcatataaaacatatcaggacagtttggtgccactaaaaaaaaataatgtctcaatgtatttaaaaattttaaatcaaataaccaattaagaacagaattacaaacttaaaaaagtcagtgtctaagtctaaaattaaatcctaatgtaagacagggagctagtataggactgaaaactaggattctctctaggcatttttactaatttaaaaataagacggctgggcacggtggctcacgcttgtaatcccagcactttgggaggccaaggcaggcggatcacaaggtcaggagatcgagaccatcctggctaacacagtgaaacccgatctctactaaaaatataaaaaattagccaggcgtggtgtcacgcacctgtagtcccagctacttgggaggctgaggcaggagaattgcttgaagccaggaggcagaggttgcagtaagccaggattgcaccactgctctccagcctgggcaacatagcgagactccacctaaaaaaaaaaaaagaaagaaagaaaataagacaactacacaaatatcctattcccaattttctaattgatatgtagggtgactttcaaatagttaacactcatcaaatacttgaatgccttcattaaccaaaatattagtagcaagcttttcttcctttcttcctaccttctttccttccttccttccttccctccttccctccctcctctctatctttctttctttcttttctttctttccctcttcccaagagaaagtgtgagtatgaactgtggtttgaggacaggggtagaggtacagtcaagccatacttggactgttggggaaggctgtcccttggtcttctttgtcaatgagaatatcaaggggaagggcaaatgcagcacatctcttgaatgtgaaaacgatgaggttccctatagcttcctcttctctacaatccttttacgtgatcctaagaaaaacccaggcccatgatgacccaaccagtgcttttcactctggtcaaaatgtctccataaaaccaagtacatgatattattcatactgacgcgtttggaagtttctttactcaaattaggtcaatttaggaatgcgactaatattgaagcttcagataataagaggaaaggataaggaggatgacttaaaaaaattaaaaagagaggttctgaaagtctggcttcaagatgcagaatggaaaggggaagttgctgctattaaatatttttacaagtttgagttggcctagaggatgcattcatagttaagccatataagaatttccaggcagttgacatgagggttagaaagacattacaaaactacttcaatcttcttatcacttaatatccctactcttcagaagagtcaaatacattttctttatcttccttacataatcttctaatttgcagaattaaagtatcagctcaatagcttatcaaataattaaacaagcagccactaaaatggacaaatctttagtaatgttacttaataaaggaacgcttgtcttttctttgatagagacaagtaaagtgatgtcttgctcccttataaagaacactctcatccctttcctttgacaatcttttgttcttattaacacattactccattttaaattatggctcatgtctatctaaagacttaactcatcttttctctgtcttggaatatataattacagcaagtgctttggtggggactaaatgtaatgctggaaaaatttcttttgcagaggcatatccaccaacctttctctccagacctaagtcccttacaacttttgtgggtaaggcagccaagttcatctgcacagtgacagggactcctgtgatagaaaccatttggcagaaagatggtgctgcactctcaccttcacctaactggaggatttccgacgcagaaaacaaacacattttagaactctcaaaccttaccattcaagatagaggagtttattcttgtaaggcttccaacaagtttggagcagacatctgccaagcagagttgatcatcattgataagccacatttcattaaagaattagagcctgtgcagtccgctatcaataagaaggtccaccttgagtgccaagtagatgaagacagaaaagtcacagttacgtggagcaaagatgggcaaaaactccccccagggaaagattataagatctgttttgaagataaaatagcaacacttgagattcctttggccaaactgaaagattcaggaacctatgtctgtacagcttcaaatgaggctggaagcagctcctgctcagccacagtcactgtcagaggtaagaaacgtgtgaatgtattttctagtcccttctctgcaaggaatcctcagtagaaaaactgttggcaaacaattcagtcagtacactttgttattaaaataatgtcattcagcaaacattatggtttgggaaagtcctggcattgtttgattttatttttttaatcctcttcaaagttcacttaacttttgttcttttaaattgtctgctattaacaaagcttgcttaaaatttcttctaagaaaaaactccaagtgtctgagcaattcttaactatcttcttttataaaattcttctttgtgtaggtagtctgtttattgttgttttattttaaatcaagagactgggaaagtgtcttagaatgataggaacctattaaatgcaccacagcttttacagaaattttgtggagatattttatgtgtgttgggtctctttgttgtatatgtctacttttcttttgcggagtttatgtttcagatatcttctcctttttcttttttgtaaacttcatgtagagccaccatccttcgtgaagaaggtggatccctcttatttaatgctcccaggtgaatcagcacgcctccattgcaagctgaaaggctcacctgtgatccaggttacttggtttaaaaataacaaagaactcagtgaaagtaacacagtccgaatgtattttgtcaattctgaggctatacttgatattacggatgtaaaagttgaagacagtgggagttactcatgtgaagcagtgaatgacgtcggcagtgatagctgcagtactgaaatagttatcaaaggtttgtttactgagtttccatccagtatttttctgagaaaagatttcccttttaattacttattacccattacttacacaatgctttcatgcttttgtagaacctccttctttcatcaaaactcttgagcctgcagacatagtgagaggaacaaatgctctacttcagtgtgaagtctcaggcactggaccatttgaaattagctggttcaaagacaagaaacaaattcgaagtagtaaaaaatacagattgttttctcagaagtctcttgtgtgtctggagatcttttcgtttaatagtgcagatgttggtgaatatgaatgtgttgttgctaatgaagtcggcaagtgtggctgcatggcaacccacttactcaaaggttagtgcttgaaaaactaatgtctctttaataaattgtcaaactagctttcttaccccatggaagaaaaactggtactttcttctcttgtcctatcctttaaatttgttttgtcttggtttgacctgggaccttgggaacaaagtcagtaactttcacctggtctttttcccgagactagtgtaaatatctattatctgataacaaaagggaataataagccattttgtcagctgacaaacatgtatcatctatgcctctgtctcttggatggaattataattattcttaacttttatttcttcttctaattaacactatgaaatagtagtattgggacaagataaatataatcttgaaaaaactcttaaatatagatggtgttgaaagtgtttgggaattgatatgttttatatgctctctttccttaactagaacctccaacctttgtaaagaaagtagatgatttgattgcactaggaggacaaaccgttaccctgcaagctgctgtgagagggtcagagcccatttctgtcacatggatgaaaggtcaagaggtcatcagagaagacggaaaaatcaaaatgagcttttccaatggtgttgcagtcttgataatccctgatgttcagattagttttggaggcaaatacacgtgcctggctgaaaatgaagctggaagccaaacatctgttggggaattaatagttaaaggtttgtgtaggaacatttaaacctcaaattgctatttagaattaaagtgaaaccctaacaagcatttagggtgctaactatttcataccattgtagaacctgccaaaatcattgagcgagcagaactgatccaggtgacagcaggagatcccgccacactggagtacacagtggcaggcacgccagaactgaagcccaaatggtacaaagatgggagacccttggtcgccagtaaaaaataccgaataagttttaaaaacaatgttgcccagctcaaattttattcagctgagctgcacgacagtggccaatacacatttgagatttccaatgaagtgggcagcagctcctgtgagactacattcactgtattaggttagtatttttagaaaatgatgctacatatgcatttgaaacccaacaaatggcctaaagtcaatcactgagcactcttctatattgaccttttctcccttcttgtgcaacacacagatcgagacattgctccattttttaccaaacccttgcgcaacgtggatagtgttgttaatggtacctgcagactggactgcaaaattgcaggctccctccccatgagggtgtcctggtttaaggatggcaaagaaatagctgcttctgacagatacaggatagcatttgtggaaggcacagcctctttggagatcatcagagtagacatgaatgatgcagggaatttcacttgtcgagccacaaattccgtgggaagcaaagacagcagtggagccctgattgtgcaaggttggctggagactttgcattttatccttattaaagattatgttcaaattaagtcatcttcccttagatcaaccctcttaactctttgaaattctttcttataccccttcttcagaaccacccagttttgtaactaaacccggctcaaaggatgttctgcctggctcagcagtctgcctgaagagcactttccaaggatctactcctctcacaatcagatggtttaagggcaacaaagagctggtttctggtggaagctgctatattaccaaagaagctttagagagttccctggaactctatttagtaaaaacctctgattcgggcacgtacacatgtaaagtcagcaatgtcgctggaggggtggaatgcagtgcaaacttgtttgtaaaaggtttgcattgttttcttgacatctttgtgctaaccttgttataaattctttcctctttctcacatttcttaataacttccttccttccacagaacctgccacatttgttgaaaagttagagccatcacagctgttaaagaagggagatgccacccagctagcctgcaaagtaactggtacccctccaattaaaataacatggtttgcaaatgatagagaaattaaggagagcagcaaacacagaatgtcttttgtggagtctactgcagttctaagactgacagatgttggcatcgaagacagtggtgaatatatgtgtgaggcccaaaatgaggctggcagtgaccactgcagtagcattgtaatagtcaaaggtttgtgttcactttgcctcttgtgttgccaaagttatggcccatggcacagacccctcctcccttaatgcaaatcattccttttttactgtagagtcaccttattttaccaaggaatttaagccaattgaagtcttaaaggagtacgatgtcatgttgctggctgaggtggcaggcactcctccctttgagatcacttggttcaaagataacacaatcctgcgaagtggtagaaagtataagactttcattcaggatcatctggttagcctgcagatcctcaagtttgtagctgcagatgctggcgaataccagtgtcgggtgaccaatgaggtgggcagcagcatctgcagtgccagggtgactttaagaggttagtgttggttccagtgagggactggcttttctgaagagtcaattcttttttttaagccacttttgctatagggataatattgattgagaattcattcttctgttagaacccccatccttcataaagaagatcgagagtaccagctccctccggggaggcacagctgccttccaggccactctgaagggctccttgccaattacggtgacttggctaaaagacagcgatgaaatcactgaagacgataatataagaatgacctttgagaacaatgtggccagtttgtacctcagtggcattgaagtcaagcatgatgggaaatatgtctgtcaggccaaaaatgatgcaggaatacaaagatgttctgcattactctcagtaaaaggttggttcagaacgtttgccttgggtttgaggaagaaatgcagatgtaagcctttcagcagggtaatgcacaacccacatctatccctttgttttctacagaacctgcaacaatcaccgaggaagctgtgtctatagatgtcacccaaggagacccagccactttgcaggttaaattttcagggactaaggagattacagccaaatggtttaaagatggccaagaactgaccctgggctcaaaatataaaatcagtgtcactgatacagtctcaatactgaagattatttctacagaaaagaaagatagtggagaatatactttcgaggtccaaaatgatgttgggaggagcagctgcaaggctagaattaatgtattaggttggtattgttcttctacagagaggattgggcatttccatgctccttcttcccttaaaatttaaaaaaaaaaacaaaaacaaattagtagattgacctttttttgttgttgtttgctttttcattgaatagatcttatcatacctccttcattcaccaaaaagctgaagaaaatggacagcattaaaggttctttcattgatttagaatgtatagtggctgggtcacatcccataagcatccagtggttcaaagatgaccaagaaatatcagctagtgaaaagtacaaattctcttttcatgacaatactgccttcttggaaatcagccagctggaaggtacagacagtgggacatacacttgttctgccacaaataaggcagggcacaaccaatgcagtgggcatctgacagtcaaaggttggcaaattttatttccacttatcaagaacttacaaaatatttttgtttcatttctaaattttcacctttattgctaagttataaaataaaacttcctattttcttttgcttgttttttctttcacctcagaacccccttactttgtggaaaagccacagtcacaagatgtcaatcccaacacaagggtacagttaaaggctcttgtgggtggcactgcacccatgacaataaagtggtttaaagataacaaagagttacactcaggagcagcccgctcagtttggaaggatgacacctctaccagtctagagctctttgcagccaaagctaccgattctggaacctacatttgccaactaagcaatgatgttggcacagcaaccagcaaagccactctctttgtaaaaggtctggtctctacatctcctcactttcttgcttgtctagattttcttgcctggggtgggccggggcgggggacgcttaagacagcagttttgcccagtgacctgtttttaaaaatattcaacatcacaattctttttccatctttagaacctcctcaattcattaagaagcccagtccagtcttagtgctgaggaatggacagtcaacaacatttgaatgccaaataacaggcactcctaaaatccgagtgtcttggtatctagacgggaatgaaataacagccattcagaaacatggcatttccttcattgatggtttagccactttccagatttctggtgccagggtagaaaatagtgggacttatgtgtgtgaagctcgaaatgacgcaggcacggcgagctgcagcattgaactcaaagtgaaaggttcgtgaatggaatctattctccattttggctgtgctgcctgataagtttggggtcttcccttgagtaagctactgtcttccttttgaatctttagaaccccccacctttatcagagagctgaagcctgtggaggtagtaaaatatagtgacgtggagctggagtgtgaagttacgggaacacctccgtttgaagtcacttggctgaagaataacagggaaattcgaagcagcaaaaaatacacattgaccgacagagtgtctgtgtttaacctccatataaccaagtgtgacccttcagacactggggaataccagtgcattgtatccaatgaaggcggcagctgctcatgcagtactagagttgccctgaaaggtcagttatacaagaagcagcctatcaaataaaaattctgtaacgcttttaaatcttatcattatgggtaggagttacaatatgtttcttcttttcacactctcttatttaatcacagaaccaccatcattcattaagaagatagaaaataccactactgttttgaaaagttctgccacctttcagagtaccgtggcaggttctcctcctatttctataacctggctaaaggatgatcagattcttgatgaagatgataatgtctatatttcatttgtggacagtgtggccacacttcaaatcagaagtgtggataatggacacagtgggagatatacctgtcaagccaagaatgagtcaggagttgagaggtgttatgctttccttttagtacaaggtttgtaagctattctctttcaaagatagtctatagcgacagtttcattagcagacattatttctagtggagttaccaatgtaactcatccacattttcatttttactacagaaccagctcaaatcgtagagaaagctaaatcagttgatgttacggagaaagatcccatgaccttggaatgtgttgtggctggaacaccagaactcaaagtgaaatggcttaaagacgggaaacaaatagttcccagtagatacttttcaatgagttttgaaaataacgtggccagttttagaattcagtcagtaatgaagcaggacagcggtcagtacactttcaaggtggaaaatgacttcggaagcagtagctgtgatgcctacttaagagtgctaggtttgtatcttcaccccagtcagcttcccttatttatagtatgtcctttgtaaacaaatagcaagagattaatggatgtgttttgctgtttgcattggacagatcaaaatattcctccatcattcaccaaaaaattaaccaaaatggataaagttctgggctcttctattcatatggagtgcaaggtgtctggttcacttcccattagtgctcagtggtttaaggatggaaaagaaatatctacaagtgcaaaatacagacttgtgtgccatgagagatctgtgtctctggaagttaataatctggaattagaagatactgcaaattacacatgcaaagtgtcaaatgtagcaggagatgatgcatgcagtggcatcttaactgtgaaaggttagaatttctttacctcttcttgattcttccttgcgaatgcttcttaaatgtatcactcttgcctttgtatcctttagagctaaaatctctatgattctggttctttagatacatattcattgtgttcaagaaatattcagccattgcctctttccaagagtgttttcttaaatgtccataaaactgtcacaataattcaactgcaagcaatttaattaaatatatctctcttaaaatctatagaaccaccaagcttcctagtgaaacctgggcgacagcaagccatacctgattctacagtggaatttaaggcaatactaaaaggaacaccaccatttaaaataaaatggtttaaggatgatgtggaacttgtctcaggtcctaaatgtttcattggcttggaagggtcgactagcttcttaaatctctactcagtggatgcttctaagactggacagtatacttgccatgttaccaatgatgttggtagcgactcttgtactacgatgttgcttgtgacaggtgtgcaaatttgattcctttatgtttctgtctgactgtgtctttggttctctgtattcagttacaatgtctctaaacaatcaagaaagtagtattctttctaacatagtaaacagtatttgctcatgtttttctcttgcctgtatactatctaatttaactattgttatttatttctgttccctgatactctcctctttcctgactctttagaaccaccaaagtttgtaaagaaattagaagcctccaaaattgtgaaagcaggtgactcttcacgacttgaatgcaagatagctggatccccagaaatcagagttgtgtggttccgaaatgaacatgaacttccagccagtgataagtacagaatgactttcattgactcagtggccgtcatacagatgaacaatctcagtactgaggacagtggagatttcatttgtgaggctcagaatcccgctggcagcacaagctgcagtaccaaggttatagtaaaaggtagacatcttgttcttgtgtttctcattaaatgaaaaccaccttctcccctgggtattatagctctttattcatttactatcattttagtttccatttgagatcatagaatatttttctgagctagtattatttccctttttagatggtttccttcttgaattttgcttacatgtaactagtcattatgaaatatttttgttattccagtgtcataattctgattacctcaacacatttgccaaacatcaaacgtgatgtttcaaaactgcacaaaaaaatgaagtaggcattttaaaattagtcttttgctttcaatcaacttacagatatatcattctcactataatctatatcattaataacaagcacttttactatatctatgcaaagtgaaagcaatacaggttttaaacttatgtttaaaacaggacaataatattttttccttctctctcaaggatcacttcctatcctttaaaaattatatgactataccttggtacaaatagtatctgtgtttttttgctgcaattttccagtgctttttttttttgtcacaaaggccaagtttgtcttgttttaagacaattattgcagtaatcatttgctgaaatggaagacttagatcacggatgttgtgatgacttccaagtgtctgttatagaacatatacaaaaaaaatcatccttgaaattagaattccatacttcatgcaaatcattatttattgctatacttgcttgtttgcaatttttgtatcaatctttgtagcctaagatacatcagtaaggtgtagtagatagaatgttgaactgttcagtaacgacatctaggatctatctgggttctctgcccatctagctggttatcttgtgaaggcaaatggcttctgaggctgttatcccatgagagtgttagtgctggactctacttacccattagaatatcttaaacctttcttccaatttaaagacaaataaaaaattttcattttgtgaaattcagtagcccaattcatgagaaattcttgttttttgcagagccacctgtttttagcagcttccctcctatagtagaaacccttaaaaatgctgaagtcagtcttgaatgtgaactttcgggaacaccaccgtttgaggtggtatggtacaaagacaagcggcaactcagaagcagcaagaaatacaagattgcatccaaaaacttccacacaagtattcacattctcaatgtggacacttcagacatcggtgaataccactgcaaagcacagaatgaagtgggaagtgatacttgtgtttgtactgtaaaattgaaaggtaaatatagttcatccacatggcagaaatgtcataaatgtgcaaaatcctacttttttcactctcgcatgatctggacaatcttttcaacaatttccatccatcttttcctgttcagaaccaccaagatttgtctccaaactgaacagcctcactgttgtagccggagagcctgctgaattacaagcatccatagaaggcgcccagcctatttttgtccagtggcttaaagagaaggaagaagtgattagagaaagtgaaaacatcaggattacatttgtggaaaatgttgcaactctacagtttgcaaaagcagagccagctaatgctggaaagtatatctgccaaatcaagaatgatggtggaatgagggagaacatggccacactgatggtcttaggttggtacaatagcccacgatagaaactggtgccaaatgctggaatgaattactaagagttactggcagattctttttctgagtttcttctagaactatatttatcctcatctatttgaaaggtctagaggaaagacatagttgatctttcaaacactcttttctgtttctgtgattctaacaaaaattagacatctgttttattgtttaataactacctgtctatatcaattagcagatacaatcatgactctctttgattaagcatgaaagaatacagagcccagcatgtgctacaagagtaattgttaaaactaacaagaactccaaaggttggcatttgatagcaaagcttccacataaaattaatgacaattaaacaattgtttgaataacaactttcaaagaattgtctttagcaccttaaggtagagcaaaaataccaagtaattcacaataacctgtagactttgatctacagagggtcaagtggaaatcaatatatactatctaatgcacattgtttaaattgttttgaagttgagtcatgcacgaacatatatttcttaagaataattgctacataagacgacagcaagagtggtgggaaaaacaaaaaataaagaaaaaactgaaaagaaaaaatattaaaataaaaaatagctataattctatgactgcatgtaattatggaatcacactttaaagtcgagagagagagcaccctaacataaccatctcactgggagaaacaatcttagtgaatgtgatagtagagacagagtaaagatcccagactttgacagatggatatcacgttttatttcagagcccgcagtcattgttgagaaggcaggaccgatgacggtgactgtaggagaaacgtgcactctggagtgtaaggtggctggcactccggaactctctgttgaatggtacaaggatggaaagctgttgaccagcagccaaaaacacaaatttagcttctacaacaaaatctcttccttaaggattctctcagttgaaaggcaagatgcaggcacatacactttccaggttcaaaataatgttgggaaaagcagctgcacagctgtggttgatgtttcaggttagttctgctgttttcttctggttgcttatgcaaattccttttacaagtttccttctttcaagtctcttctattctttcaaatcatgatgagtctcttacctttcctcacacagaccgagcagttcctccctctttcacacgaagactgaaaaatactggtggggtgttaggtgcttcttgcatcttggaatgcaaagtagctggatcatcacctatttcagttgcctggtttcatgagaaaaccaagattgtcagtggagcaaagtaccaaaccacattttcagataatgtctgcacattgcagttgaattctctggattcctcagatatgggcaattacacatgcgtggctgctaatgtcgctgggtctgatgaatgtcgtgcagtgctaactgtacaaggtcagtagacagtcaaacttgtaaggaatttcttacaaattcctcttcaggtgcacatctatgttgacaaacatttgaaagtgctctaatgttttattcaaaattgcaactccatctgaagcttacaggatcttttaattgttctccatgtctatatagaaccaccctcttttgtgaaagaacctgaacctttggaagtactaccaggcaaaaatgtaaccttcacaagcgttattagaggaacccctccattcaaagtcaactggttcagaggtgccagagaactagtgaaaggagaccggtgcaacatctattttgaagacactgtggcagaactggaattatttaatattgacatatctcagagtggggaatacacctgtgtggtttctaacaacgctggccaagcatcttgcactacccgtctctttgtgaaaggtttgctcaagtggattcactttttctgttttctgtataccgacatccttgtgtttttcttgtgtttaactgctgtgctttgtcacttactagaaccagctgcatttttgaagagattaagtgatcattctgtagaaccagggaagtccataattctggagagcacctacactggaacacttccaatttctgtcacttggaaaaaggatggttttaacataactacctctgaaaaatgtaacatagtcacaacagagaaaacttgtatcctggaaattctgaatagcacaaaaagagatgcagggcagtattcctgcgagattgaaaatgaggcaggaagggatgtttgtggagctctggtatctacattaggtgtgttgtcttattgtctcttaaatcatttgcattcttctaacatgtagcatagtttctttgatattcattaattccagttgctaactgtgagcctttcttccttagaaccgccttattttgttacggaactggaacctctggaggcagcagttggagattcggtttctttacaatgccaagttgctgggacaccagaaattacagtgtcttggtacaaaggagataccaaattacggccaactcctgaatacaggacctactttacaaacaatgtggccacacttgtttttaataaagtgaacatcaatgacagtggagagtacacatgcaaagcagaaaatagtataggaactgcttcttctaagactgtgttcagaattcaaggtgatgatattttacaaattaaaaaaattcttttttccttaactcttgtatctttatggtgaacttctcatttcatctcctaacaccttaagtattacatgtctccctacagagcgccaactcccaccttcttttgcaagacaattaaaggacattgaacaaactgtggggttacctgttacactcacttgtcgattaaatggctctgcacccatccaagtgtgctggtatagagatggagtacttttaagagacgatgaaaatctacagacttcatttgtagataatgtggcaactttaaaaattttgcaaactgacttgagtcactctggccagtactcttgctcagcttccaacccacttggaacagcatcttctagtgctagactcacagcaagaggtttgttcacacgtcactctttttctttgcaaactgtggcttcatatttcattgtcaaagtagaaacgaccaatggcaaaaaaacaaacaaaaaatacacattgcctttcttctcatcctccagaacccaagaaatctcccttctttgacatcaagcctgtatctatagatgttattgctggagaaagtgctgattttgagtgtcatgttactggtgctcaaccgatgcgaatcacttggtcaaaagataacaaggagatccgtcctggaggaaactatacaatcacatgtgtgggaaacactcctcatttgagaattcttaaagtaggcaaaggagactctggtcaatatacttgccaagcaaccaatgatgttggcaaagacatgtgctcagctcagctcagtgtaaaaggtatcattccatgacttttgacaatatttgttccttaccatatttgcataattgtcttataaaagtttctttggtttttaaatgtttgagagaaactaactggacatgttagaatttgtgtattagtgttggaggcaacattaatcaaagttgtgttttctctttatattgttctttacattagtgtaactctaagtgtaatcttatcaaaaagtattgtttaattgaaatttgttaaatgttgttttaactatctagtccattttttaatgctttcttgttatatggcattctgatttatcattactaaatgttgatcaaatacatctataatacattaacttttatgttttaacttacatagtcaaactaaaaaaaagaatcaactaaattctctattaaaaatgcacatgtaccctaaaacttaaagtataataataataaattttaaaaaactaaaaaaaaaatgttatgagattatttaacttaaaagataacttattttactgtaaaatcctcagaaagtatattcttaataacaaaccagtttaaatataaatttatgggatcttcagctacaaaaacaagctcttttaacatgtataataaatatcccttactgactgttttgtttggtttactagaacctccaaagtttgttaagaaattagaagcttcaaaagttgcaaagcagggagaatccattcaactggaatgtaaaataagtggctccccagaaatcaaagtttcatggttccgaaatgacagcgaacttcatgaaagttggaaatacaacatgtcattcattaattctgtggcattgcttacgatcaatgaagctagtgctgaagacagcggggactacatttgtgaggctcataatggtgttggtgacgccagctgcagcacagcgttgacagtgaaaggttagacacactaagcttctttgtttctttattctcctctgatttgggctcttagcaaagttatgagttccaaaataaaaggataattaaggttatttggttgcaattcttcaacaagttttaatgaattgtcatttcttgtgtcagcatgtattgtcatatgatcacaccagtcactcttcaaggttctagatttaatttttttttcctttatagtaagcaagtgttctcattgtttatctccttttttctggtagcacctcctgttttcacccagaagccttctccagtaggagctcttaaaggttctgatgtgattctccaatgtgaaatttcgggaactcccccatttgaagtagtatgggttaaagatcgaaagcaggttagaaacagcaagaaatttaaaatcacttcaaaacattttgatacaagtcttcatatccttaatcttgaagcctccgatgtcggggaatatcactgcaaagctactaatgaggtgggaagtgacacgtgttcttgctctgtcaagttcaaaggtttgtatacatggacacaaaaatatatgccccttcctcctatctgttcttgcctaactaataacttgtgtggccatgattctcacattttttcctctaaccacaaatttctttcatcagaacctccacgattcgtgaaaaagctaagtgacacctcaacccttattggggatgctgttgagttacgggccatagtggagggcttccagccaatttctgttgtctggctgaaagatagaggtgaagtcatcagagagagtgaaaataccaggatttcattcattgataacattgcaaccctccagctggggagtccagaagcatctaattctggaaaatatatatgccaaatcaaaaacgatgctggaatgagagaatgctctgcagtcttgactgtactaggttagtagcaaagcacagccagagaaaaaatcaatttacttgatccatgatcattttcctcaaatattcctcttatccagtaattcagtgattgcactcttgagtttgaaaggttactttgttttcaatgcaaaatacttcttcttttagaaccagcaagaatcatagagaagcccgaacccatgactgtcactactggaaatccttttgcattagagtgtgtagtgactggaacaccagaactctcagccaagtggttcaaagatggaagagaattgtctgcagacagcaaacatcacattacattcatcaataaagtggcttcccttaaaatcccctgtgccgaaatgagtgacaaaggattatatagctttgaagtgaaaaacagtgttggcaaaagtaactgcactgtatccgtccatgtttctggtgagtagaatgagatttttatgaatatacaatatttccagggggtggaggggcacagaataaaacttctctttaaacgcaaaactacccttccccacatagatcggattgtgcctccttccttcatccgcaagctgaaagacgtgaatgccatcctgggggcctcagttgttttggagtgccgagtctctggctcagccccgatttcagttggctggtttcaggatggaaatgagattgttagtgggcccaaatgtcagtccagcttttcggaaaacgtctgtactttgaatctgagcttgttggagccctccgacacaggcatatacacgtgtgtggctgccaatgtagctggttccgatgagtgctcagcagtcctgactgtgcaaggtcagtgtgcaaggataaagctgctgcttctctaacacctctttcatgtggacgtggtgcctgccttccctggagtttctttattttgtcttcatgtttagtcttagctccctttttttaaggagcaaaagcacttctcacttggatttctttcttctctttatctccccttccgccttgcaatatctagaaccaccatcttttgaacaaacccctgattctgtggaagttttgcctggaatgagcctcacattcaccagtgtcatcagaggcacccctcctttcaaggtcaagtggtttaaaggcagcagggaactggtgcctggggagtcatgcaacatctctctggaagattttgtcacagaactggagttgtttgaggtgcagccattagaaagtggagactattcttgcctcgttacaaatgatgctggcagtgcttcctgtaccacacatctttttgtgaaaggtttgctctttcccccaatatatacatcttttaaaatttctcttaagtcttcattagaaggcaagaattttacccacatgttttctccttatagaaccagccacctttgtgaaaagattggctgatttcagtgttgagacaggaagccccatagttctcgaggccacatacactggcacacctccaatctcagtgagctggataaaggacgagtatcttatttcacaatctgagagatgcagtattactatgacagaaaaatctaccatactggaaattcttgagagcacaatagaggattatgcacagtacagctgcctgatagaaaatgaggctggtcaagatatctgtgaagctctggtgtctgtcttaggtgtgttgacagctacctctttttattgctctctttcttttcaaacatcctcttttacatggcatgactgacttgctgactaccatcctttgtaccatagaaccaccgtactttattgaacctctggaacatgtggaagcagtcattggagaacctgcaactttacagtgtaaagtggatggaactccagaaattagaatttcttggtataaagaacacacaaagctacgatcagctcctgcatataaaatgcaattcaaaaataacgttgcttccttagtaatcaacaaagtggatcacagtgatgtgggagagtattcatgcaaggcagacaacagtgtgggggcagtcgcttcttcagctgtgcttgttatcaaaggtgatggtgttgtttaacctagtgtgtgtgaacagattcattttcttaaaaacgttaaaacttttatgaattgaaatatgttgtggatgccttctcacctgtaaataaggattatctgtaacttctttacagcgcgcaaacttccacctttctttgcaagaaaactgaaagacgttcatgagactctaggcttcccagttgcatttgaatgccgcatcaatggctcagaacctcttcaagtgtcttggtacaaggatggggttcttttgaaagatgatgctaatttgcagacatcttttgttcataatgtagcaactcttcagattttacaaactgaccagagccacatagggcagtataattgctctgcttctaatcctcttgggactgcttcatccagtgccaagctcattctctcaggtgagtaactcacagtaccctcttcattgtaaagcagcttcactgctccaggccaccaaaaggctggtgccatttagtttctgctctgtatgtgagagcatggaaataaaaatcaccatgttggtcttcattcttttcagagcatgaagtgcctcctttctttgatctaaagcctgtatcagtagatcttgctcttggagaaagtggtacttttaaatgtcatgtaactgggactgcaccaatcaaaatcacttgggccaaagataaccgagagattcgccctggaggcaactacaagatgactttggtagaaaatactgccactctgacagttctcaaagtaggcaaaggcgatgccgggcagtacacctgctatgcaagcaacatcgctggaaaagactcttgttctgctcagctgggtgtacaaggtacttgttagagtgaaggagcaagatctcttttacattttcagtatcttaaaatataggagggtgggtgtgcttgagagagagctatgtttaggaccagggtctagtgatgaaaatggatcaagtggatcaaggaccttccaaatggagacaagtattttttaattactttaaaaaaaaaatttaaaactaggaaaacatggaccaaaagtccattttaagagactaaaaatagagactagagagagataaccgaaactctacaaaattgcaagaaaatcctagtttgaaagacggtatcataggacaaaagcgaagttattgcaaatgacttttttcccacagtacttagtaaatgaatggattttgtccctctaaggcatagcaaagagccaaactatcaagcccttcaaggagaattcagatgagaatgataagttcaacttactttcctccactagccccacttaaataatagtggaggtcaggggctggggagtaagtagatcagtatctgctattatggaaggcagtcatgtgtttctgccacatgtttatcgctgctactgtcagaaattaaatagttcactcaatggactgctagtctagtccattagagtatttttaagggtttttgtagtggtggtttataaatatcttgaaattaaaatataattagatttagcagcccatttgctctatgacatatagctaatcacttttacttccctatgcctgaattttttgcttcagttaatgaggaaatcattactctcacacacttcaaaggaaaattatgaaggttgaggaaatacccatttaacacctaaaagaggaaaatggcattttaaaaatattaagatatctgacccactttgccattccggctcttcatgctatgtaactgatagcattgcagccttaggaaatagttctccactggttcatatacaagacagtaatcaaattctcattccccgtggacctcagagggcttccactgacagatacatgctattatctctgatcttggcactagagaagggactcttttgctggggagaggatggcacaataaagagtaatgtctttttctccttcttttagtaataatacttgatgtggatgcttacaaaaacaagcatattttattttagaaattttctatttaggtttcatttaactcttcttccttgaactgcataaatttgttttccagagctaaagacctctctagcaaagattattttttccacctcatcttgaattatatgcatctgttccatcccttaccctgtgtttttcctcttggttccatagaaccacccaggttcattaagaagctagaaccttcaagaattgtgaaacaggatgaattcacaaggtatgaatgcaaaatcggtgggtctccagaaatcaaagttttatggtataaggacgagactgaaattcaagagagcagtaaattcagaatgtcattcgttgactcggtggctgtgctggaaatgcacaatctcagtgttgaagacagtggagactacacctgtgaggcccacaatgcagcaggcagtgccagcagcagcacatccttaaaagttaaaggtcagcgctctccccacctgtgtgtttttcacattagcctcctctttaattgtcctcttaacttcctgtttgactcttcaacgatgttttaaaatagggaaaggacacaacaaagaattgaaagtgtttttttcactctctatctctctgatggagtggaagattgattcttacttttaactatatacttacagaatacatccgtattttccttttttccaattttagaaccacccattttccgcaaaaagcctcatcctatagagacactgaaaggagctgatgttcaccttgaatgtgagcttcagggcactcccccatttcacgtttcttggtataaagacaagagagaacttaggagcggcaagaagtacaagataatgtctgagaacttcctaaccagtatccacatcctgaatgtcgatgctgcagacattggggaatatcagtgtaaagccacaaatgatgtgggaagcgacacttgcgttggttccatcgctctcaaaggttagatggactgcattcacttctgctcactacttcccttctaattgtaatactctgttgccccctccaccccagcccagtcttatcactagcagcctattccactttccctttgtttcctctccaagtccttttctgtttagtctgcttcccttttccaaatcctactgaatatccttttagataatgttgtaattaggttttgattggattaagaaagctggagtagatgagatattcaactttcctactgaatacaaactttaatgtgtccctgctcgcatccaccaaaaatgcctcttaaatggaaataacacattatcactagtttgattcccggcattcacgatttgagcaaaatgctgtcagtctcacaaattttaaaacccaggctttcctcctttttcatcagcaccaccaagatttgtgaagaagctcagtgacatatctactgtcgttggtaaagaagttcagctgcagactaccattgaaggcgctgaacccatttcagtggtgtggttcaaagataagggagaaatcgttagagaaagtgacaacatatggatttcttattcagaaaacattgcaaccttacagttttcaagagtggaaccagccaatgctggaaaatacacttgtcagatcaaaaacgatgctgggatgcaagagtgcttcgccacgctatccgttctcggttagtaaaaagatgatgttatcacagatacaaggcacacactcaccaggatctgtattttctttagtttttcaatttgagtttaaaatatggatatcttttacatttcattccagagcctgcaacaattgtagaaaagccagaatccataaaagttaccacgggagacacctgtaccttggagtgtacagtagctggcacccctgaactcagtactaagtggtttaaggatggaaaagagctaacaagtgacaacaaatacaaaataagcttcttcaacaaagtatccggccttaagatcatcaatgtagcaccgagtgacagtggggtatacagttttgaggtgcagaaccctgttggcaaagacagctgcacagcttcattgcaggtttcaggttggttgatttcttgggcttttccttcatcattataataatgtagttcctgattttcataaatgtatatgggttgttacatcttctataggataacatgagtccgacatcttctgaatcagcaaattcagaggcaataccatctgtagaattagaagaaaaccatgttcaaaagttatatccctttctttttgaggaatttccaaaatgatgataggaatgaaaaatagtccctggataaggttaaagcagtcttcatttatgctgaaataattcaccacataattcttcacggcaaagagagaacaaaatccctagcaagtcaaccatcacattctgcccactgattctccaagcttttgatagtgtgaacccatagaggagtttttaataccgtcacaaaagagccaaatggatctagggatagtccatcaaaaagacagttctctcttcaagtcattttataattgttgtcctttgttttttttgttttgttttgttttgttttgttttgtatcattcagaccgaaccgttcctccttcattcacaagaaaattgaaagagacaaatggtctatccggctcctcagttgtaatggagtgtaaagtctatgggtcacctccaatctctgtctcctggttccatgaaggaaatgagatcagtagtggaaggaaataccagaccaccctgacagataatacttgtgctttaactgtgaacatgctggaagaatcagacagtggtgactacacatgtatagctactaatatggctggttctgatgaatgtagtgctcctttgactgtgagaggtcagtttacaaaacagtaaaatgaattgcatttcatagtttattaagcatgtttgtcataacaattcacaaatactaaaccttttctgatatgtgcttttgtgtttagaaccaccatcttttgttcagaaacctgatcccatggatgttttaactgggaccaatgtaactttcacaagtatcgtaaaaggaacacctcctttcagtgttagctggttcaaaggtagcagtgaactagtaccaggtgacagatgcaacgtgtctttggaggattcagttgctgaactggagttgttcgatgtagatacatcacaaagtggagaatatacttgcatagttagcaatgaagctggcaaggcttcttgtacaacacatctctacataaaaggtttgtcagactgctcttctagatttatacgattagtaattagatgtgtctttgtctgtatgtatatgtgtttgattttatattttcaatttggtcactttagccccagccaaatttgtgaagaggctgaatgattacagcatagagaaaggaaaacccctgatcctagagggtacattcactggaactcctcccatttcggttacctggaagaaaaatggcataaatgtaactccttctcagaggtgtaatataactacgactgaaaaatcggcaatcctggaaattccaagtagcacagtagaggatgcaggacaatacaactgctacattgaaaatgcctctggaaaagattcctgttcagcacaaatactcatactaggtttgtcatgattgcacatttttatctttgtatacaatcgatgatctggcatgtctccttcatgactgattgattatctctcttggctgcagaaccaccgtattttgtcaagcagttggagccggttaaggtgtctgttggagattctgcctctctacaatgccagcttgctggaacccctgaaattggggtatcctggtataaaggagatacaaaattgagacccactacgacttacaaaatgcattttaggaataatgttgctacactggttttcaaccaggttgatattaatgatagtggagaatatatctgcaaagctgaaaacagcgtgggagaagtttctgcatcaactttccttaccgttcaaggtgattgcaatatttttaaagtgaacgaatttgtgtttcttttgaacaagatttaaaatgtctggggaggcctattttttaggaaaatctttccaaaggcttaaaattctgcttaagtaatcctatttacagttagtggcttatctttttctatggattctacagagagataatatgactaaatctttaattggaaggattatgcaatcatttgcttctataattaaatcttttttaaaaagtgaccatatatttttaaattccaccccgtaagtatctcatgcaaattgctagaaggcagtctttaaaattacaggaatctgctgcttgcccagagacatgccttcagccaaccaattgctttattggttttcatactgttttgcacctactgtgcattagggttggtctcagagtgatacttttgctccagaaatctatatgcttttctttatctccaagttaattcaagagacattaataattcctgatttttaatagaaattgcatatatacgtgcgtttgtatatatataattgtgagaagagcatttagtaaattaaagtatttgttacttttattctgttcctacagagcaaaaacttccaccatcattttctcgacaattgagagatgttcaagaaacagttggactgccagttgtttttgattgtgccataagtggatcagaacctatctccgtgtcttggtataaagacggcaagccattgaaagacagcccaaatgtacaaacatcatttttagacaatacagccacactcaatatttttaaaactgaccggagccttgcaggccagtattcctgcacagctacaaaccctataggctctgcttcttccagtgccaggctcattctcacaggtttgtggattcttaaactttcatttctagaattaaagtattataatcaaatatgaacttagggagaaatttctatttcagtaaactgacatggtccagatattgagcctgaaaccttgtctttctgctctactattagaggggaagaacccacccttctttgacatccgtcttgcccctgtggatgctgtggtgggagaaagtgctgactttgagtgccacgtcacgggcacacaaccgataaaggtcagctgggccaaagacagcagagaaatacgaagtggcggaaagtaccagattagttatctggaaaacagcgcccacctgacagtcctcaaagtagacaaaggagattctggacaatatacctgctatgctgtgaatgaagtgggaaaagactcttgcacagctcagctgaatataaaaggtatcgtttattttgcaagtggtccaacaaaagtgtaatcattttgtagtatagcctgaaggtgtcgtttttatgatgatgaatgcaatttaggacatttttaaacaaatgaaaagaaaatgtttaagaggaaataagtttatctagagaagaagtcattttttaaatctgtatttctttctttcctcgagacaggatctcattctgtcgcacaggctggagtacagtggcgtgatctcagttcactgcaacctctgcctcctgggttcaagtgattcttgtgcctcagcctcctgagtagctgggattacaggcgcctgccaccatgaccaactaatttttgtattttttggtagaaacggggtttcaccatgttggccaggttggtctggagctcctgacctcaagtgatccacccgccttggcctcccaaagtgctgggattacaggcatgagccaccacacccagcttataatctatatttctaaaactttatatattccctatgatactgagactaccccttctttttacaaatttgtgattctctaaatggccatgagttacttcttatcatccaccttgtaagtcaaagaacagtttagaataagctcgtagaaggaggctgaaatgtttaggaacatattctgatatagtgtatttagttggttagccttgatttttaactaaaaatatgagggttttttttcttgaaaagcttcatattagtaatctgcttctagcttctacttcatatatccttgcaatttcttatagagcggctcatcccaccaagtttcactaaaagactctcagagacagtagaagaaacagaagggaattctttcaaacttgagggacgtgtggctggttcccaacctataactgttgcctggtacaaaaataatatagagatacaaccaacttctaactgtgaaataacattcaagaacaacacgttagtgctgcaagtcaggaaagcaggcatgaacgacgctggtttgtacacatgcaaagtgtccaatgatgcaggctctgctctgtgcacgtcttcaatcgtcatcaaaggtgagttatcctcacagccccaacctgttgtgtttttcttcactgcctgttatatatccatgagcatttcttatgatatcttgaccaagtaagttataacaaatataaatacacattatttaactgtgtatttatcactccatatgtttactaaaaatataaattattgtaatttaattatgtggcttcccgaaggaggtgtcatttaacggactaatatcttaggtttctaaatcatatcctaaaattcctttaggtagttagaagtttcagcgtactctgaaatgtgtgcatatgtgacatatatttttatgaagcacatttgttttgaaatttttttaatgttcatcaccaaatatcacattaacttgactattattgagttatatattatatcacagtctgaaactttctcctttccaagtgtatttctaaaggattattgtttaatgtatattgcccaaagcgtttgacctgcaaacaaatattaatcccagacaaaagggtaacatttgcccaaaaagaaaaataatgggtagaaaacattgcatatcattatggaagacatatttaaatacacaatcatcgcttgagaaaatgaaatagaccatgttgtttaaggatatctttatctgtttctcttcactgtaatggcttccagtaattacaacatagcttcatcaaaatcacattaaaaactaacctcctagagcagcctggaattaattaccaactcttatgatctggttagttatctcacagtgcacaggtagtaagttattattaataggctgatatcactaataagtaaatatcactgagttgtcttaaaattccagtttcaccactcattttgtggaatttagatgcatttagttttaaaacacattttataaaatgaaaaatatatacttagcagtggcttatcttcatgatttacactcatgatggttttaccatgggcagataaatgctttctatagaattctgaagctatttataaaatgtttttaaaggatagacatcagaagttttaatctttgcaataacaaaaaaaatggccttattctttctaggtacaggtctcagaaccattgaacaaaatcattacataatactgagttgtacattgccttcctatcatgttactcatcaatgtcttcatcattggtcttcagttaaacactgagcctcaactcctaattcccttgggctaagattggattttaaatgctactgtggctgcatttaatagctaaagatgaacatcagagaaaatcacatataaatatgtgggctcatgtattactcaaatgctagctttctttcctagagggtagcaatcattgccgctggagataagcagaattcccaaataagcccttcattttcagggttcagcaaaaacaccgctgtacacaggtttgagagaattaatagtgtgctatatggcaaagaagttcatagtaactgccaatgtctgcagtgcttagtaaggacacagaggctggggcaatttgtgggcagcatgtgatgtgttctttgcttgtttttaaacctttatctttttaaaaaatccaacaaatttaaactattgtctttagagaggaataaaccaggcacataattctgtcctactacagcaacagtgttacctgttagaggccagtttttctctttatttgtttctcttgtggaatttaatacttttttgcctttatgttcctcatgaaaataccttttcaattccagaacctaagaagccacctgtatttgatcagcaccttactccagtaacagtgagtgaaggagaatacgtgcagctcagctgccatgtccagggatctgagccaattaggatccagtggttgaaggctggcagggaaataaagccttcagacagatgcagcttcagctttgctagtgggacagctgtactggaactcagagatgtggctaaagcagattcgggagattatgtgtgtaaagcttcaaatgtggctggaagtgacactaccaaatcaaaagtgaccattaaaggtacagacacctcaaaagtattatgcagctcaagccagcaaccactcatgtttatttgcttattatgatttccctagaaatggaattagatttttagaaatatcagttgttgctcatctgcaatttgtaggctccttattataattgaaatattaggtaatttaacagaaataatgtcaatacaaagtatctgaaattactacaagtttaccaccctatttcttgaacttcttttcaccatatccattaagatgtaattaacgcagttccaaaaatgatgctataataatgcgatagaaagtaggctgttgtgatacacctggaaaaaataaaaccaagtctaaaaatattgacactactaatatgattatagttcaacctttgatagctatcattagcataaatgtctgagaagctgctttatcttctgtaacccacccttacatagaaagagaattctgcagtacttacttatcaaactgccaacctcctaaggcttattttacaaagggggatatgtattgtaattctgaggtgattgtagtaacaaaacatgtaaatgttttttcagacaaaccagctgtggccccagcaaccaagaaagctgcggtagatggaagactcttttttgtgtcagaacctcagagtatcagagtcgtagaaagtaagtgcacttcatgagaagtacatcttcatctatcttataccttttacttatgatttaattttggaagaactgattttagaaaattaaatttttattcacttgttttcattattccttagaaaccactgcgaccttcattgcaaaagttggaggtgacccaatcccaaatgttaaatggacaaaagggaagtggagacagctgaaccaaggaggtcgtgttttcatccaccaaaaaggcgatgaagcaaaactggagattagggacaccacaaaaactgattctgggttataccgatgcgtggcatttaacgaacatggtgaaattgaaagtaatgttaacttacaggtggatgaaaggaagaaacaagagaaaattgaaggcgatcttagagcaatgctgaaaaagtgagttcaataaaaaccacaaatcgtacaatcagccctccatataagtgggttccgcatccacagtcaaccagccccagtggaaagtattaaagaacaaaaaatttaaaaatacaaataaacaatacagcataacaaccatttacacagcacttacattgtattagatattataagtaatctagagatgaagcatatgggaggatgtgcataggttacatgcaaatactatgccattttgcatcagggacttgagcatctggccacaggcctcctgaagccaatctcccaggcatagagagggatgactgtaatgtcccattcacaaaaagaatctctcaagagtcatgggccatccatctcaagattcagattgttaaagaacataggcatatagacattttcacagaagcagataagcaaatacacaacatctgggtgttcttgtttcattagaatcaatttccgaatttaagagaaagttttaagaatgaggtgaatgtctattaagatttttaaacaaaaagaaatggcctataaagaaaccccagtattgtctgtgcctaggtatgaaactttttttctatatatgatttcttatgttatgaatggttctctaaaacaactgttttaaacattttccataattatcattcatttcaatatggttcatttttcaacataattattaaattaaatccacactcaatttccacacatcgtttccgtgatatgtatactattctattattaaagttttccattgctattattattttttctgatattataattcattagctaggctctttggttataaagtttacagaaatacttctattatcctttcccttcttaaaattttcattcctacatctatattttattacaatggtcctaatccatctgatcttaatcgactccatctccaaacccacatttttaaattgtttcacagctaacatggtaaaattaatatttattgaataaagaacatagaaaaccttaatgaagtatataatctttgaatgatgatagacaattaaaaataagtagaagacaggtgttttatccttactttttaaattttatttaggactccaatcttaaagaaaggagctggagaagaagaggaaattgatatcatggaacttctcaaaaatgttgatcctaaagaatatgaaaaatatgcccgcatgtatggaatcactgacttccgaggtcttcttcaagcatttgaactgctcaagcaaagccaagaagaagagacacatagactggtatgctccttcatatatagcatcatgctaaaaaagtcacatttaaaacatctcacatattccctttgaattaccagaatcctatagttatatgacgtcatttaatatgacctaaccagcatccagaatggaagctgaatatagtcatgcgtcctctaaatcaaattttgtttcatctgtaatgcctatcatttttgttcttctcaggaaattgaggaaatagagaggtcagagagggacgaaaaggaatttgaggaacttgtatcatttattcagcaaagactgtcacagacagaggtaaaaagaattatgttgataataaaatgaacaagttattattgagtattattataagggaaggagtaacaaatgtgttttaattctttattctcctagcctgtcactctgatcaaggacattgaaaatcagacagttttgaaagataatgatgctgtctttgaaattgacattaaaattaattatccagaaatcaagctttcgtggtacaaaggaactgaaaaactggaacccagtgataaatttgaaataagcattgatggtgaccgacatacactcagagtcaaaaactgtcaacttaaagaccagggcaattatcgattggtttgtggtccacacatcgctagcgctaaactaactgtaattggtaagttagaaaaggcttatgaaatacttgtgagatttaaattactgttgagcacatctgcgtgtgatattgaacaaaatgcgtgttgtatcacatgaacagagcctgcatgggaacggcatcttcaggatgtgactctgaaagaaggccagacttgcaccatgacatgccaattttctgtaccaaatgtaaaatctgaatggttcagaaatggcagaatccttaaaccccaaggtagacataaaacagaagtggaacacaaagtccataaattgaccattgcagatgttcgagcagaagaccagggtcagtacacctgcaaatatgaagaccttgaaacttcagcagaactcagaatcgaaggtgcgtgaaacactatggagtccttgtgggtacagcataggtcaatggcaaatgttgtgcaggacccctgcaaccctacctgtagacacacaccaaagtggtcatgtgttcttatttcccaacacacgttctcatagtattcatctcaaagttcatacaaaagcacaagggaaatattcaaatgagtgtcagttcttttgcatcgttcttttagattttaatctagtctaagacataatctttaacagttatttctgtctaaagtctaaatttcatgattctcatatctaggattgtagaaagaaagctaggaaaggacaagatctcatagatgtaaatctggaggatcttggctaggaattgatattttgtttataggacttagtctgactttctctgtacaaaattatatagataacataaacatgtcatgtgcaattagcaactatttttcaaaaatatttatttcattttcagatcatgtttcaaccttctgaatctctgaaattaagtgaaatctcagaatttaggagtaacaacattcatttcctaattgattatacacattttccaaagacaccctcaaactgtattgagaaaaattttggctatgataatagcatctgctttcagctattggtgcccattcgtagttgctgaaacacaaatatatgacattggatttacataagcatgtcaacttttctgacttaccttacaatgaatatcagtgactggttgtattttaaatggttttcaaattaaagggccagctgcaagtactaattattttttaaataattgatatttttaatataattctttagtaaatagagctcaccagagtactgtgatttctaagactttatggtactgttatacatataagaccctcccctccagcctcttctagaaagcactcctgccatccacacacatactttgtttgtgcccatatgtacttagcagatttctgaactctaaaatttttctttttgaaatttagaagtgcagatttccgattgcgtttgaaattattttacaggaaaagttatacatattagataaacaattatagatcctgaatagcaaaaattattttactgaggcaagaaagaatttcacagaggaataagttgtagagtacaatcaagtttgtgttccctaacacttttaaaatttaatttgactttgggtcattagctctctttagtatgttctttatataaatattttaagaactcacaataatttctttacactttgctacattcgaccagcatgaatacacttaagaattgggatacttttttgttagtgatgcaaagaagagtgcatttcttctcattttggatttttgaacttttcttgctattttataactgggtacaaagatggagattttaagtatctgaggtaaaagcaagtaaaagaaattcctctctatataatctaactttgaaccctctttgtacttaaacagctgaaccaattcagtttacaaagcgcatacagaacatcgtggtgagtgagcatcagtctgccacctttgagtgtgaagtgtcctttgatgatgccattgtaacatggtacaaaggaccaacagaactgacagagagccagaaatacaacttcaggaatgatggccgctgccattatatgaccatccacaatgtgaccccagacgatgaaggtgatttcattgacagttttccagtgaatgtataatttaagcctcgtctgttttctgtatttctaccctgtatgcgctcatgctctcattctatctagaatgcttttttagaaaagacaagtgtaaataaacacatacgtatattgaagtaaagaagtgttatttgcaacatatcagaaaacaaaagttggatgatttttcaccctaggtgtctactcggtcatcgctcggctggagccaagaggtgaagcaagaagcacggcagagctgtacctaacgacgaaaggtgaggtagcgccatcagaaagccaccctgccatcttcgaaacacgtagcctacctataccattctgaacacaaaaatatcattttttttttattttgcagaaatcaaacttgagctgaagcctcctggtaagttgttttgtaaaaatcaatccttgcttacaataaatttggcataattttgtaaatcacagaagccaaactaaaatgtataagatatctttctcttttgggtaaaatatttttcaataaaactgttatgcagtagaattactttcagtcaaataataaaatgttaaaccttgtgagtctggcaaattagagataataaggtctcactcagctgatgctagaatcatgttaaatagaatagccacagaatgaaacaaattttgacagtgaacaaaacttacctgcgtggttgcatacaaaagaatactaatattattttgtctgtatattagattctgccattagatatgcctgacatatctcaggatctaataaatcaaacacaccttagttttctaataaatagcttgttctcagtctctctatgcttattacatgtccctttccagatattcctgactccagagttccaatcccaaccatgcctatcagagcagtgccaccagaaggtaagacccagaacctcaacatctgagcttggagcagcaatattctagcactaggaatctgtacgaaattttataccagcgaccaaactgcagcagagtcagaacaaaaccttccatgtcatattcttcagtgagcaattagaaattaaagtaaaaaaaaaaagtagttccagttataaataaatgctacttttatttgttccgactgatgaattcgtactataatacctatgaagtactgaaagaaatgcatgagacttttcattatattttacgcaaaataagaaactaaaacatgttactaacggcatttattttcttcagaaatccctcctgtggttgctcctcctatcccccttttgctaccaacacccgaagaaaagaaaccaccaccaaaacgtattgaaggtattatacctcatctacctagatgtcgaaataagaatttcactctgctgacccgaaaaatgttgcttaatacaacgcattggccctctagtggtcaagaggtggaattgcctttcaaaatgtaaattactttctcaaagtattagctaactaaatgtgtaagttatgtgcttaaaactctgaaaatcatcaaacaaaatactattttggtattaaaatattttattttaatgaaattactgaaacattaatagagaactaatttaatgtttcatattttcctaactactatgtataacaaaaagaataatggaaccaatttctagtgcagcttatagaaataaaccatagtagtttacagccaaattgcaaattatagcttgtggcttttctcaatttatagtattaactactcttaaaaatttactattttgtcacataaaatatgatttagaatacttatgaaatatttgacttcttttgtacctaaggcatgatctcaccaataaagagatcttaagtgttccaaggaattgctcctctcaaatactcagtagagaagttgtagtatttgtgtcccaaagcttctcaactaaattagacaacagatttcctgggactttctggagttatagggagttcagaaatgctgtcagaattctcccagcatggtcagaaaaaattctgtatgtcaaaatcacatttttctatagctaagtcactactactgtattagattcaaggggtggaaatggtaggcccttaacacccgctataattggcattaaacgcttgacctatttttcagccagccttagaggaaattcaattagaaacttccaattttgtgactaatgcaacctcattaacaaagagaagcatttttatgattcatacgaacataagcattttatctagctgtgagaacagagaggaacaagaatcaacaatcataaattggatttccatttctatttctgttgtcaaaaataataacttatgttaatgaatgatttgttctttgactggtagtatcaacatggctaagtttggtactcactgtgaaacttgagaagttaaataatgttttaaaaattaaaaaagaggcctggcgcggtggctcacgcttgtaatcccagcactttgggaggccgaggtgggcggatcacgaggtcaggagatcgagaccacgatgaaaccgcgtctctactaaaaatacaaaaaattagccgggcgtggtggtgggcacctgtagtcccagctactcagagaggctgaggcaggagaatggcgtgaacccgggaggcggagcttgcaatgagccgagatcgagccactgcactccagcctgggtgacagagtgagactccgtctcaaaaaaaaaaaaaaaaaaaaattaaaaaagagtgggctgggcgcggtggctcacgcctgtaatcccagcactttgggaggccgaggcgggcggatcacaaggtcaggagatcgagaccatcttggctaacacggtgaaaccccgtctctactaaaaatacaaaaaattagccgggcgcggtggcgggcgcctgtagtcccagctactcgggaggctgaggcaggagaatggtgtggacctgggaggcggagcttgcagtgagccgagattgcgccactgcaatccggcctgggctaaacagcgggactccgtctcaaaaaaaaaaaaaaaaaaaaaaaaaaaaaaaaaaaaaaaaaaaaaagagtgttatttattcatgaatacaaaaggccataatcaagtatgattaggaaccgtggttaaggtataacagctgcacaacaaaggactttaaacccacttgttactcttcctcctaacatatttgtgttcgtccctaaggatgaagcaaagatgaaaatgtgtactttactatttatgatatcacttagattcacactccatgttctgaaaactttaactctcagcagacataaaatcagtgaagatgtaagatcacagtacattttctatatccctccaaaacaatttttttgcatctagtcctagatctttccaaaacaaatatcttgtagtaatatgcagaatctcgctactatcaacatatggaaaaataaaatatttcaataaaattcctagtttcctgaaagcattttagttacttacaccagaaatattttttctttttttttctttttttttttttttagttaccaaaaaggctgtgaagaaagatgccaaaaaagttgttgcaaagcccaaagagatgacaccacgtgaaggtattataattaatcaaaaagcagtcttaacacttttttcttggccaaaacttttaaattctaaacagtggagggtgaaggaagggtaagagtttgcaatcacaaaatggtacctctcccttcactcactttcgccctcgtctttgactcagtcctcactctctcaactccttttttcccccttttctctttcctgtcctcctgagcccctgggaaccaatgacaacaccagtgtattctggttatttctggatgaaaatttaaagaaggtcttgcccagaaatccaacagctattctttttttttcttttttattttattgtaaattgactatttactattgtgtatatatttatggggtacaaagtgatgttatgatctgtgaatacaatatggaataattaaatcaagccaattaacatatccatcacctcaaatacttaacatttttgtggtgagaatatttgaaatttactcttagcgattttgaaatgtacagtacactattattaactatattcaccactctgtgcaacagatctcaagaaaagccatgtttcttctgtctaagattttgtaccctttgaccaacatttccccattccctcaaatccccagcctctgtaaccatcattctactctttatgaattcaacttttttagttccacatctaagtgagaacttacagtctttgtctttctgtgcctggcttatttcacttagcataatctccagttctatccatgttgtcacaaatgacaaaattccctttttttataaggctgaatagtattccattgtgtatttatataccaccttttccttatgtattcatccattgatggacacttagggtgtttccataacttggtctttgtgaataatgctgcaatgaacatggaagtacccaacagctggtcttgataaagtcacatcaatgtaagatcaagggttgctgctaattttaagaggttgctgcaacccacctcagtatctttcctgatttaggtgatctaaatatcaatatttgaagaaaaaatactttatgaaggaggatcaattcaaatcactttaactttcaatatatcctcgaagatttttaggaaaacagttggataactaaatttaaacaaatagttttaactcatttgactaagattagagtacagcaacctccataaagaaggaaaatatggaaacacaaggcatcattcatcattcagacttttctgagtggtcatttgtgaaacatcatggaataagaggacactcaaaaagcatggatatttcatgaacttcatagttaataattgaaaaagtctaatgtgttatttttagcattggacatattaaacattctcttcatgcttaatgttaacttattagaaatcaatctaaactagaaccaatttaaatgatcttaaatcaatctaaactagaatcaaactttggccttttgcatgtttgatttttgttaatatggccttgcatagcatttctaatgagctagatttggaaattatagaagcattattatgattcctggaagggctggtgtatgagtagtagtcatagctcctacaaacaactaacaatgatgtggaggattagtaaacattaataataatgtaatctaaaaataaacacacatttttatgtttttaaactcccagagattgtcaagaagcctccacctcctactaccttaattccagcaaaaggtaaataaagataaattatttttattctgtttattcctgagatttgcacttctgctaactattcttattttaaatattaggcttccaacttattgaaagttgtggagtctcctctgctgtgttaaatttagcattagaaatgatggctatttcatattgcccctttcccaggaaaacaaacccaggcagatgtttatgctgcctctgtgcaatggtctcagagaaagaagaagtgagggctagaaaggaagggccattccttatttttttattgtagttaacacaaatgttaagagtcatataaataatgagagcccttaagaactttaaaaatctgttatctaaaagtacctaattaacttggttacataattttaaatgttgtttttatgaaactgactaagggatcatatgcaatagtcaaaaacctaggtttaaaattagaaatgtttttgaaataataatcagaactttttaaaaaggttaactgtataaatatgaaatataaattccatgaacttatcgaatattaaaactattccactggaagaaactaggggttctgcaaactggagctctcatggaataatagaaggtgtgtccatttgataatatttattgaatccattttttcatactggaaaaatcctcaaatcaagagtagaatgcatcttgatactctactatgttccatagtcaaaaatttaaatggaaccaatacaaaaaaaaaaaacaaattatcaataaaatagatctgaaatactgatgttgtttaactaggtagatttttgtttagtgaagcagttggatggatagaattaatatgctaatagtatctttatctattttagctcctgaaatcattgatgtatcctctaaagctgaagaagtaaaaataatgactataaccagaaagaaagaggttcagaaagaaaaagaagctgtgtatgagaaaaagcaagcagtccacaaggagaagagagtcttcattgaatctttcgaagaaccttatgacgaactggaggtagaaccatacacagagccatttgaacaaccttattatgaagaaccagatgaagactatgaagagattaaggtagaagctaaaaaagaagttcacgaggaatgggaagaagattttgaagaagggcaagaatactatgaaagggaagaaggctatgacgaaggggaggaagagtgggaagaggcttaccaagaaagggaagtaattcaagttcaaaaggaggtctatgaaggtatgtataaactgaatgacttgtttccctcttttcttcatttttgctcagttcattaaattttcaatgctatgaacctgatttgcagtttatgtgaaatagttaaaatgatcttagatttttttaaggttagaaatcttttaaaagttattttcctcagagttactttcatgctttgacattacaagctaaatcatttagtcttattactaacactaaattccaagtgctaatttctaatgcagaagttcaagttttacttttactgccttgttgcatctctgcttgatcctgcttcaaatcctagcactaagaattgtgttggtaataacgatcccaaatataatacttcacacgattatatattatccttaccttatctcatttgcaattaacaacctaagagaacttacctatttaagcatcccttcttattcctgtgtttttatttcagaatcacatgagagaaaagttccagccaaagtacctgaaaagaaagcaccaccacctcctaaaggtaagtaattagaaatatttaaatagactagagcatcaacatcattatcatggcttgtttggcagcaatgtataaatcagcagttcaatccaataggcacaacttcttctctaagctttattgtgaatgatttttttttcttaaaatttctatctaattgatttcattaaaaaatcaaaagatgataaaaattgtaatggtaaacttaaatataaccaaaatatgttaagtacagaaacttgtacccagagttcaaagttgtgcgtaaaggtcaaagaaaaaaaaaccgaactcatctctctctttaaaaaatgatacatgtatctgcatatacacttataggtgtgtataaacacatatacacagagagagagagatagagagagagagaattttaataggaattctaaaagtactgcaatttctctaaaatgcttgcagttataaagaagccagtaattgaaaaaattgaaaagacttctcgaagaatggaggaagaaaaagttcaagtcaccaaaggtattatttaaaacattcctagcacccatgtacacaagtaatatgtttactgatctatactcacattagttatttatataatcaaatacttttaaattttgtgcaaagcaatattcttcaaaatacaaatatatttgtacatatttttaaagtacctgaagtttcaaagaagattgttccacaaaaaccttcccggactccagtacaggaagaagttattgaagtgaaaggtatacatctttgtgtttcagctacaagttcaaaatttttttatttatgtgtatggacatgtgtacatatattgctaagtaactcacaaatctgaaacgaccaaaaacagcacatttttacataatacaaattttatgttgagttgcacatatgtttaatttaaatagtaacattatctactttgtttctagttctgcttaaaaattacatttttttattataaagaaggtttgtgtttaattagtagtttgctaacttcactatgcaatgcattccattgcatataatattccctgtcctcttatttatagaaatagaccctaacagatttggaaaagcacaacattgtgtgtgaagaagttgtgtctatttgattctcatttaagaatgtttgatgaaggctgcatgcattgtttgtccctatagatcaaaacatgatttgttttcttgtcaatactgaatttgttctcaagctaccatattaacccactcattctgtgtctaaatacttgagtataaaatccatgtgtttgatctgatgtcttgtactaaaaaaaaggaatactaatgtgaaatactctctttaaagtaccagctgtgcatacaaagaagatggttatttcagaagaaaagatgttctttgcttctcacacagaggaggaggtgtcagtcacaggtataaggcaaactggaatgtgggggctcaaatggaagggttttaggcagatttttatccctcttgttgtctaatttgtgatcgtgtagacatttctgtctccttgtaaattctgtcatctttttcatttcatgtttgtctctgttttcatttttattttaatgttctttgtaaattacaattaccacccacaacatggcatatcagtaattaaaatgtacatttttttaagtccccgaggtacaaaaggaaattgttactgaagagaaaattcacgttgccatttccaaaagggttgaaccaccacctaaaggtattagtaattcattctaagtttaaactcttttaataaaaattagtacaaataccatagtaaaacatttatgttagtattaaataatagatttagtcacagtgtgcatacctatagccactatgtacaaaggatgtgatgggggacgggaagaaccatgaggaaggcacagggggaaaaaagtgaaaattatgggaggctccattccctgcttcagagagtttgcaatctcgtaacctgttacttggaaatacagtgtcctggagccagttcatgctagctcaccagagcctatggttacattttcaggaattttgccagtcagtagtttaacaccaccattattaaaaattagattatgtaaatttacagtccaataaagtatatttttaaatattaataaatactcaaaactcctattttactgcattttgttcttatctgtgtttctgagattgtttccatctttgtgtctgtgtggtggaaatgccatataatgtactactgcacatctctttccaactccaggacaatgacatcaccttgacagccagggtgggagggagtgtttataccaccttggaaatcggaaatctgcaagcactatagatcaaggctccaccccctccatcccacccaaattgttaaacatttaagacacaaaaaaatctaatgcaattgtatttatgaaactgctttataaaagtaaaggttacaaaaaaaaaaactaacttcatagttatcgatgttcataaaaagctggtttctgaggaactgacacaggcacctccgagggaggattgctcctacctgttcctgacaaagtagaggcttctgcagttaaaggtgacagcagtcacattttctaattagccattcagccatcttcatttactctcatttctaaagcataattttcttgcattcagttggtataaaaagggaatctctatttaattctaagtcttacaacaacatatgccttgtcaaatgcacactttctcaaaaatggcacttttcttttaaagtccctgagctacctgagaaaccagctccagaagaagtggcccctgttcctatccctaaaaaagtggagcccccagcaccaaaaggtagaataatatttgtgaaaaaaataattcttagcatccatcttgtatctttttctataagatctgtgtattaacaaaatagcatctgtaaaccatctataatatatttaattctgtgtatattgatttcatttatttgtggtgatgtgttatacaagtattggtaacatttctaaactccagatcacgctaactgggtctttgtctgcttgtgtaatgtatgtaatgtctatatggtgttgaggtatttagctttcatttctaccacaagtaggcatatttaaattacttcctaattctcacactgttagtgaagatttatgctttaatgtaatcttagatgtctcagaaggtgactagaatattccacattatttcaacaattgtatctttaaagttcctgaggttcccaagaaacccgtgccagaggagaaaaagccagttcctgtgcctaagaaggaacctgctgctcccccaaaaggtacgccagagccaatgatggggagactctttgctccaagtgccagccttttgctttctacgatcttcatatgtactatgctgcctttgtcttttgtctcttttacattcttcttgtgtttttactgtttgtcagcttccgtgccatgctcttgacatactttatttattatactgaatattcctaagacatcaccaaaaagtattgttaaaggaagtaactatgtcaaactgctatcttacatttttaatatcttccctcttttagagaaagaggaaatgtttgtgaaacttgttttctactgacatgtttctaggaaaaaacctttcatccttcataaatgtaactttttcttaataaaagcagtttcatgcattatgaagaggtggagacaggcaatgacaactggagagtgtctggcagaactgaatgttaattacataaagacgtacatagtaccacgcttcttaaaagtcaatagtggcgagtcttcaatagtggggaacatacagattttttgaagtttactttcaccattttcttgagaccttaactgagcttcagtatttgccataaatgtttccgttatctaattagctagtcaaagtacctttcacagaggtatgtttgaatgaaaatgtgctgctgtggtatatcacaaatcccttgctttggtttgtttgggatttttttggcgataaaaggcactatcttattgaagcactgaagctacaattgcacgcatccattcagttatagagagactcagcaagaattcaacattatccaatttaggagaaaccagacctaactaaaatagtacattttgaatagtgttcccttggcctgactttgcaatgtttctattttcttcctgaatcaaatatgcttctctctttctcaaactcttggctctttcaaaattcttttgattatctaaccattaaatacaaaggtcatgttagtaaaaccaatactaatactaaagctacttgagacagatcgtcttagataaattaaatccattgttattatgtactacatttccccatacaaagcataaagaaccttttctatatactatctgaacattcttgactgtttgtgtaatcactaattcgttttcagcaaagtcatatatgtcttctaaaggagacacagaggcatctctcatttactcataaaaacaaatacacatagtataatagcacgtatatatatataaatactgcatgtatatatagcataacatatacatatataaattaacagctatataattgcaccaaaatattacaaatgcacgtgcagaggtgcagggattcacaaaagctgccaatattgtatttaaaatgagaacaattattgccaataatgcatgctgttaaaattcatcttccaattaaaaagtcaacattatccattcttagaatagataaatcaaatacactgtaaacattttttaggttgaaaaccctgttcaaaactctagagccccttagaaaaaaaaagcacaaatacacatacccacaaaattctgcacacaaagctctgtaaagtcattaacacatgggtatcagattgagagacctactctagagtgtttcctgagttttgaattcactacaggcacaccccccaaaaatgagaggagaaatgtggggaagagaagtaagttacacatattcaactattctaagacttcttagtcttagtctaaaatagtcttagataaactaaagccattgttattaagtactccatttctcaatacaaagcgtaaagaagttttctatataccatatccacattcttgattgtttgtgtcatcactaatttgtttttagcaaggtcatacaatatataaaggatgaattctgtgcacaactttgttacataactcatttttgcctaaatgcctctaaaacattatttgtgatatttatcacattgtgatccttggaatagtatagttagtttaattttctggataattttgctgatgcatagataatccataacaacattaatgtactacataaagatttgtgcatgtgcctatgttctttcataaaagtgatatatgtctgaactaacattgtgtttcaaaaactttaagtcccagaggtgccaaagaaacctgtccctgaagaaaagattcccgttcctgttgcaaagaaaaaggaagctcccccagctaaaggtacagtggctttcgacgtaaagccctatcttttatctttgatacaaaatatgttgtgtttaattatctgttcattgagttagtttaattctaaatgaatgttttgtggtgagaactgaacaaaagtgtctgtccacccgtctgctttcttaaaaaaaataactgtgcatagctactttagaaaatataaagtcaattctaaaaatgtctcttcaagttcctgaagtacagaagggagttgtgacagaagaaaaaataaccattgtaactcaaagagaggaatctccaccaccagcaggtacttaatcccatctccatgaaataaccttgtctttccttcaagcctctttaattgcatgtcttctttaattgccacttctatgttgctcatttatttggcctttttgacaaattttaaaattcaatactatcctttaagtgccagaaataccaaagaagaaagttcctgaagaaaggaaacctgttcctcggaaggaggaagaagttccaccaccaccaaaaggtattgtttctccatcttcccaagaactgtctttatgttccagtgattttgttagttttgtgatatgagtgcactgtgggtgtatttctttgttttgcactgggcttcaatgagatcacattaaatttctaaaagtgcataatgtctctaaagtgccagctctgcctaagaaacccgtcccagaggagaaagttgcagtgccagttcctgtcgctaagaaagctcctcctccccgaggtaggatttgcctcaatcctctgacaaaaaaaaaaaaaaaaaaaaaaaatcttcgagtgtgttaaattcttgctttttccatctggtctgtgcttatactgatccattgtctcacttgcagtgaaacttttgtgtttatgtccttgtgatatgtaacttgttttcccattttgctagtcaaagtggtgtactgtgcaactcttccccaaattctagaaagtgagaattgttaaaattcttgattttaaacttcaactttaacactttcttaaagctgaagtctctaagaaaactgttgtagaagaaaagagatttgttgctgaagaaaaactatccttcgcagttcctcaaagagtggaagtcacgcggcacgaaggtatataatcggaagtcaggggataaatgagtttgtgtgtgtttcctcaaagtctcttcttcttccacatgtgattgtttactttagaacatgtcctcatcagttatttctccttatgttggtattagaatgtgtctaccttttgtagccttctgggactgagtcttttgtgtctatgttggccttgaatcattcgaaggaagtggatgagtcccgaaaatgttataattttgaaagtggccacacttggacataactcaagtatcattctcagtcttgggctgtacttgccctcatcttaaattagcttcctccttcttatagtgaggaagtaccatgaagctatgtcctaagcagatagaagaacagttatccatctgtagtgaccacatggctgtatatacatctgtatctcagcaggctgaatttaaatgaaaccttatcttttaaagtatctgcagaggaggaatggagttactcagaagaggaggaaggtgtgtccatttcagtttatagagaagaagaaagagaggaggaggaagaagcagaggttacagaatatgaaggtaaacaatgcaaataagctagagatgatctggggttttgatgaggtgttttctttcacaaattgtctacagaccaatgaaaagagacagaaaaaagtgacacaaattcagtgaacatctaccagtctcattaaatgaatattttgatcaaaacacaagattcaggaggattatactagattagagaaatccagtgtatttcttctgcatcccttcttacttgcctacatagaataaaagaggcttcatatttatatataattaatcagggcaggtatctccatatacatatatcctttcattaaacaggacttggcttcagcatggtgggctggcataagctttaccttagtagcctaatgcctaattggtgtttctcaaacattgcttgtaccacaatccacagacagaaatatattttatattataatcctttaatttttttattctaggcatttaaaaaatacaagttataatccattaagtcaattgcagaagtcactataatgtcttaaaatgttttaaaatgagcaagaaaatatattacctcattacattccaggagtcaatgccatatttgtgagtctgaagccctgaacacataaggctttcctgtattttacatatggagaaaaccattgtgttatatatgggatcagactgacttgttactcagatcttttcatacctataatgctaattatctatagtttcttaaggacagaaccaacaaactattccattgggatattttttcaatgaattaaggcagcaccaggtttccaactaaaatccagcattctggctagagccatgtggccaaaagaactttcctaagaaagttcctaaggtctgcttttaaagagaaatcaataagctccttaaccaaactaactctctccccagtgagaagatgagtagaattgaagtacatttagatgtcccaagtatctgtttttatctgtctaataaaagatggcacaccatgccccttttttcacttggaacaaaagcccatgtaaaaatccaaggtgccatagtcttagtggaatgccttggaataggccaagatgggacatgactcccaggaggaaatccattaactctgttgtgcttcctggaagaggccatgatggtggacataagtcaggaagctggtagatttgaagacgactccatcttttctaaaagtgtttgtaaaaccaaacatagtctgatttcaacttttgacactataaacttcctgtagtactccagactctagttaaaaggagaaacactgtgattatttttatgttctcattatgccccaaagatgggtggcttgttaggtttactttcagcgtaaggagcagatatgtttttaaccagacacttctattccttatttaactttgaccaggcatggtggctcatgcctataatcccagtgctttgggaggctgagaagggaggattgcttgagcacaggagttcaagaccagcctatgcaacatagcaagccccattctacaaaaattaaaaaaacagctaggcatggtggcatgcacctctagtcccagctactcaggaggctgatgcaggaggatcatttgaacccaggagttcgaggttacagtgagctgtgattacaccactgcattttagcctgggcaacaaagcaagacattgtcttaaaaaaaattaaaactggccgggcgcggtggctcacgcctgtaatcccagcactttgggaggccgaggcgggtggatcacgaggtcaggagatcgagaccatcccggctaaaacggtgaaaccccgtctctactaaaaatacaaaaaattagccgggcgtagtggcgggcgcctgtagtcccagctacttgggaggctgaggcaggagaatggcgtgaacccgggaggcggagcttgcagtgagccgagatcccgccactgcactccagcctgggcgacagagcgagactccgtctcaaaaaaaaaaaaaaaaaaaaaaaaattaaaactgtatacacttaggctcaaaaatcatgtgaagcctcctgcctcttctaccatacctgccccacaaaactggcggggaaaacaatatggaatattatcttacaattcacttaaatcctcaagtatgtttctgccctgtggccttcaaatctacagtgctctgctatttgtgaaactcatcttcaaattcttctgttcttattaactcagctattataatcgtttcttgtcccgtacttgtcctgtcgttgctgtggatataagcattattatctgtatgacacatttgaaaattaagttaatgaaacctatttcccatttcccatactcttcattaacgcatgtgctttgattaaaatgctctttgagtattttaaataggaacaagcaggggtttggcaagggttaaacttttgctattttgattactctttgaagtgataaattaaagctaaaaataaacatgaaaaacactgtaatttatcttctttaaaactgctgtctttaaagtgatggaagagcctgaggaatatgttgtggaagaaaagctgcacattatttctaagagagtggaagctgagccagctgaaggtatgctgactctttaattagttttatccctatgttagcttgtctccttctttatgtttccttatagctaatttgtcatccatattgcaaatattgataaatatcatgtctaataaaaagatcccttacacttttatcgaaaagaaatctagacatttctacaaacatattttataatcttttcaagtgacagagaggcaggagaagaaaattgtactgaaaccaaaaattcctgctaaaatagaggagcctccaccggctaaaggtatgatttctttcaaagaaatgcaacactatttattttaatgtatataataataccttcacatttgcataactgtcttatgcataacaatttgcataactgtctacgttttgtcagaacacatgtatgaacgtatttactgagtatagtcattaacgtttgtatatatgtgcaatcttttcaaaaagtgaatgctaagccccacaactgtgtcacttcatatgtaaggcaaactcatattcttaaacctaatctttctaaagttcctgaagcacctaagaaaattgtgccagaaaagaaagttcctgctccagttcctaaaaaggaaaaggtgcccccacctaaaggtatattggattttattttattctcaagactgtctttttttaatcttaaattgatacattcttcagattttttaaacattaaccagaaaataagtgtgcctgtgtttagtgttttccatatcgtatgtttgatggtattgcctggtatcttttaagtgccagaagagccaaagaaaccagttccagaaaaaaaggttcctccaaaagtcattaagatggaagaacctctcccagccaaaggtaaacaaacctccccagcagaaaaactaggaacatatggcttgtctttctttctctctgctgctgttctttgggtcatactgtttatatgttggtgggtgacaatggtgtctttgggtagagtattacttgtgatgtttttgtgtgtgtgccttgtaaattcttctattctaaaatcacagtactttctggctagtatattttttacgtccactttgatataactccctaatcctaaaattatcttttaagtgactgagaggcacatgcaaattacccaggaagaaaaagttcttgttgctgtaactaaaaaagaggcgcctccaaaagcaagaggtacatccgcccttccattatgcacaatattgtacttgccctactctctttaccaaatacactggttatgggggctggtttttgttgttgttgttgttgttgatgttgttgttgttgttacagttgttgttttatgtttgaaataatgaaaatgtcaagtgtttatgtttgggctactactttatggctgcctttttgtggtttgaaagagggaaacaatactttaaagtgaaatctctctttaaagtgccagaggaaccgaagagagctgtcccagaagaaaaagttctgaaactcaaacctaaaagagaggaggaaccaccagctaaaggtatactgactcttaaaaaaaaaaaaaaaatcaaaataagcatccagacactaaaactaatctagtggaataggttccattagaaaaaaaaagacatagtataaagtaagcaatataagtttgttaatgcatatcacttcaaaactaaacatttttgataacagaaagtacttttttcttaaaaaaaagtgaggcttcttctaaacgtatgtgaataattttccttaatctgtatttgtcttctaatgtcttttccatatactaaactcatctgcctagatgcttgctttatgtggcaatctctgatgaaatttttaattttttcaattctgaattttctacattgtaccaatagagctaaggaaaatgtcttagaagtgaggtgaagaaactattcatgtaacataggtttctgtctaatgcttctacttagtttgatagtcattatttatgctgtttagttgtctttttaaacttttataaatactacttgattttcctaaaattattcaatgtctttgacgtacttcatatgtatattagagtaagtttatttccaagtctattgattttcttgctttttaaatgaaagtttaatcaggcactgttatggttgtctttgtccttgaattgtttgaacaaaatttctcttcacacacacattttcagaatcttgcaattcacttttaataattactcctttaaagtgactgaattcagaaaaagagtggttaaagaagaaaaagtatcaattgaagctccaaaaagagaacctcaacccatcaaaggtatattgaactttgattaagtaatgtgaggcatgaaactatctggctctttgccttctagttcccaatctgactcctatactttattagcttattgttgattaagggcagggtatataacatttgaaatcacaattgctaaatatactctatgataccttgactggccaaaaaagaacagtcagggtctcccataatcagtgcatgaaacaaacgcaaaagaataaaatcaaagcacattgttactatcagtcatccttaaaagtgctttaaagtaaagtgctgcctgttgttaatattgtttcagaagtaactataatggaagagaaagaaagggcttataccctagaagaagaagctgtttcagtacaacgggaagaagaatatgaggaatatgaagaatatgattataaagaatttgaggagtatgaaccaacagaagaatatgaccaatatgaagaatacgaggagcgggagtatgaacgatatgaagagcatgaagaatacatcacaggtatgagcaaaactgcaaactcaaaaccacactaaatatgtgcacactcaaacaagataaaacaagataaatcataacaagataaaaatttggatacccaaagaaatttggaaagaactttgtttcatttcgcaaatgcggaattttcttctttgataacttctagaaaaaattttaaaaaccctctataaatcttaaggttattgttagacttttgttccgggaataatctaatacccccctcatttttgctcgtatgcaaaatagcaaatgtccctaagtttctttttcaaaaaggttacaagtttatcttcaagtgcccgtgatcattctagtacatggttaaaaatttctgaacatcctttattctaaaacttgctattacggagtatgataggctattgagaaaatgtatttacccacagggttcccattatcaaaacttgacaatgactgcttcaaaagttaagatagagatgtaagctaacacaagctgttgtgttttacctaatgaaggtcaaatttgttggcatatagtttgggcttcaaattgtttattttactcaaagaataaatctctattgaaattttgaaatgaatcaatcttatttcacttattcagtctctgatgtttcatagcccaactttgagaacattctacatagtcttactgatagctttaaaaaaaccatattataggggagtttcagccaggaatttatctacctgaaatgaaatgagaattttaatatgtaagaattacctaattaaagaaaatagcaagaaggaaagggcaatatgagcttgttctgcttggatctctgattcttgcctacttcaataggctatggctatactgtagataaaagatattatttcaattatttgattccttttaagaaatgtttaaacttatattctaagtctaacatgaaataccttgtatgtacttttaaagaaccagagaagcctatccctgtaaagcctgtcccagaagaaccagttcccacaaaaccaaaggccccaccggctaaaggtagagtgaaaaaaacattattacctgtaagagatctttgtttcctccatgtctgtcctactataaaaatatatgtaaaagtggcagtgtacaaattatgtgtgtgtttgggaatattatgttgtatttgtctttcttaactttttgttcttgctagccttgagaaacctgtttcaatttttaaaatctcttaatattgatattttgaagtgctgaagaaagctgtccctgaagaaaaagtaccagtgcccattcctaagaaactcaaacctccaccacccaaaggtacattactgagtaataatcaccaaaaacaactttgttatgtatgttctaaaatcatgtcttcctagcccgtctgatggtctgtgtttttgctgagtaggatgttcttgtcctgattcttacatttcagttttttatgtgtatttattacatagtattcaaggagttggttttaatgctctttaataattaatatctttaaagtgcctgaagaaccaaagaaagtttttgaggaaaaaatacgtatttcaattaccaaacgtgaaaaagagcaggtgactgaacccgctgctaaaggtataatgatttccttcctcgattgtgatcttttctgatgcctcttttgaaattaatgtaactatgattcatttcattttgttgtttcatgtcttttaaattagttgtcagcagaatgttggatgtaaaaatgtgtaaatacaggataagaagataatgcctttaaaaggaaaaattatttctaaatacatccatagcctgttagccagtggctgtgtcctgccacatggctacaatacatataaaatagaatgtttgggtttaaaatcagtgaccgtttggcatattcctgatttacctaaatgatgtaatgataccataatattcaccaagctttggtaactgtttattcattctaaattcattttgaagattttttttaaagctaaccagtttccagtcattttccccctgattcatactaagtatgaagtatactaattgagaagtaaatttcacttttcaggaaggatatttctttcaagcagagatatttgaacactaaacctcatttcacatttgggctctgctacttcatgtttacttgggtacttctgtgtacttgtatttatatgaagctcagaatcctttccacagagagtatatagtttcttaaagatgaacaatcgcatatgtatctcattaaaggaagatacattattctatctgcttaaagtacagcaaaacaagcattggctgggtggccttttactgacaataaaatttccttatacttcatatttcaagtgcccatgaagcccaagagggttgtcgcagaagaaaaagtacctgtccctagaaaagaagtagcaccacctgttagaggtacctaatggcactcattttaatgttttgttcgtcttttgctgttgaattcctcttcagttctgtgtgtgaaaacttcttttgtgggaaaagtaaatcttgtcctttcttctgttataaatgggcctgtgtttctaaggtgtcttaattttgttgagtcattggcaaatgtccaacttaaagataatatctttaaagtgccagaagtgcctaaagaacttgaaccagaagaggttgcctttgaagaggaagttgtaacccatgtagaagaatatcttgtagaagaagaagaagagtacattcatgaagaagaggagttcataactgaggaagaagtggtgccagtgataccagtcaaaggtagatgatgcctcctgcaaagggctgtgcaacagcatctttggagtttgggggtctgatttggtcagattctgggggttattggcagcaccaatgattgcttactttaaagcagatatttttagatgctgaaatatgatttctacaggtgcttttcacattttatttctttcctgcaaaatttccaacattcttaataatatctttaaagtgcctgaggtacccaggaaacctgttccagaagagaagaaacctgttcctgttcccaagaagaaggaagctccaccggcaaaaggtacaccaccattcattgacgggtatctaagagacttcatctgcctagaaatagttaactttcttctgagttcaaaaccttgtgtgtgtgtcactgtccgttgttaaaaaacattagctgtgttttatatggatgtgttgttactagtagttagaacttaacaataaacaatatctttaaagtgcctgaggttcctaagaagccagaggagaaagttcctgtgcttattcctaaaaaggagaagcctccgccagcaaaaggtacatccttataatccatcagtggaatagcatgataattcacccatgcagcataacttggtgagccatagcagatctttccccatgacaatattaacaacattaatgccatgacaagcgcctctcaactggccacaggagcagtttacccggtattcatctctgaattttaccatcaaattatgcttatgctcaatggttggctcctcctctttagtggaaagttcttcaagtaaaatacattccttttgcatatcaaaatggacaaaaccatcatttaccaggcattgtgtcttgtctttatcaccagtccacgtttttttcggtgttttttattttaatttttgtgtattttctggcctttgttttgtggctattataattttcagtcttaaagtgaaattgatagaatatctatgctgcttcagttaaggccttacattgccagccttaaaatcttagctatgggtaaaaaatgtgacactaactctatttgatatctttgaagttcctgaagtgcccaagaaacctgtgccagaggagaaagtaccagtaccagttcctaaaaaggtggaagctccacctgccaaaggtacatgaacttgcaatgttgcaatatttttatttcacatttgcatatgggtaaaaattaattggtttaattctgtactctttgggatgcaactctttagagaaaattaaatattttattttaaaaataaaatgcttcttggaatacctttgtcatacttttattaccttatcttaatcttttgaaactatgcttggaatcagtatttttatgtcgtataaaatttttctctaaatcatttcgttaaagtgccagaggtacccaagaagcctgtgcctgagaagaaggtgccagttcctgctcctaagaaagtggaggctccacctgcaaaaggtacataatttcatcacttagagtacttgggggaaaaaactcacatctatgtatactcacatacaaatttccccattacattgtacatttttaaagtgtctatctggttagaaatatgtcagatattttgtgattctttttcatatctattgctctaagacattttaaaagaacatattcctaaatataaataatatctttaaagtgccagaggtgcccaagaagctcatcccagaagaaaagaaaccaacacctgttccgaaaaaagtggaagcaccaccacccaaaggtacattaatctgtaacagagccatggtaaaagacaaaactaactggtgttatacagccttactaattataattaatgcttagtatttatgttgataataattgatgctttgtgatcacagaatatttgcctttcataagcttcttcattgttgtgaatattttacataaaagtgatgtttgtacccttgaataaatatctttaaagtgccaaagaaacgtgaaccagttccagttcctgtagctctacctcaggaagaggaagttctatttgaagaagaaattgttcctgaagaggaagttctacctgaggaagaggaagttctacctgaggaagaggaagttctacctgaagaagaggaagttctacctgaagaagaggaaattccacctgaggaagaggaagttcctcccgaagaagaatatgtacctgaggaagaagaatttgtacctgaagaagaagtccttccagaagttaaacctaaggtgccagtacctgcaccaggtatagcagctcttcttggaatcatcaaggcctcttttgtgttgaattctgctttcccatccttttgttcatctccagttttatctataatcctttaccctctgtgattgaccacctaaatcttagaaaacattccagacatgtgtgttcttattgtgtatctgccttgtgtatctgtctattgtaaattatctaaatgtcttttcaaatcacatattatgtttacatgtttgtggtcttatcctcacgtgtctctttcatatatatatatatatatatatatatgaccatgtatatgtggtttttaatgccttcaaatgaaatgtttttaagtgcctgaagtgccaaagaaacctgtaccagagaagaaagtccctgttcccgcccctaaaaaagtggaacctccaccaccacccaaaggtacacctccccaaagtgaatacacattgttcacccatagcttggtcacataaattatgatgaaactgggttttaggaaaattatatttacaaaatggataatcacacagttacatatttacttctaacgatgttcaggaacactgatatctacttttttcactgatacaaagcagtattcaagaacaaagatgaaaggaagcattgtcccagaactgatacaaaagttctgatttcatatcatttgattaaacatcatagttttcatggagatatatttaaatatatatgaataagtatactatatatttaaatgtattgaaaactattatgaataaatattcttaaatttcttccttcaaccatttatattaaatgcctttttaacaccaggctaaaaagaaaaaaagatgaatgtatttatcaaaacacagaataatagttatgtcttctaatacatatatataaagggcagcccaacaggttttgattttagcgttgactttacaccttgttgtattactctcagcgagtcctttaaccaacctgagcctgaagttattttcctgtaaattggggatgctaatatcagtcttaatgggctcagctattatggtgagaattaaataaagtaaggtattaaagtagtctatcattgaatgaatagtatccagatttaacatattcaatcagctcatagtacaggacagaattaatatatttgtgctttaaagctcaataatattttctacaaaagatgctggcatggctgcttaaaatcagcataaccctcgcatcaggccatatagttatataatcaaatgaaatagtaaagctgatcttttattggatatcaacgattcagaaatactttctagacaataaattactagtgaaatttaaatgtatgaaatgatattaggttggtgcaaaagtaattgcggtttttagcattaaaagtaatgtcaaaaccgcaattatttttgcaccaccctaatagcatctgtcctctgataatgacatatgctgctggtcccttgctttacaaatcccaattacattataatatctgggctcccaactaacatgacagacctgtcttgagcgactgttaacacattggtctttctgggtgtggggtcttcttggtttctctttttttgtccttcaaaataaatccttatcatgaaatgatgtctttaaagtgcctgaaattaagaagaaagtgacagagaagaaagtggtcattcccaagaaagaggaggctccccctgccaaaggtattgctattccgaagtaaattagactatgccatttccttccttctcctataaaagtcaaaatgtcctgtttccgtatttgttaatacaacttatattactgctgtgtctacttgtctttgtgtgtgtgaaactgaacttataaaataaaataatatttttaaagtgtctgtggtacctaagaaacctgagccagaaaagaaggtccctcctcctggtcttaagaaagcagtggcccctcctgccaaaggtacatcatcccataacagggatatgtttgctgcaccgatgttgaactgtggttctatccacacaggacactcaacataaatgtgtgcattgtatggtctgtcattcacattcgtcatttctgactcttttgcacccaagtttgtgttgtgtccattttttcacttggtgttggtgtgctttacatcgtttctctatgtatgttgtttctaaaaaataaaaatatatctttaaagagccaaaaataactaaggaactagtccctgaaatacccatttcttcatacccatttcttcctacaaaaaaaaaaaagacaaaagaaaaaagaaatagaggctccagcagtaaaaagtagaatttctctttaataaaccctaaatcttaaaccacaaacctttttattcttttctcattaaccgattctgtgaaatgtcaatgtttcatcttgtgtatgtgccttgtgatatttactctcttatgttggaaactggaaacgtggtctttattcttctttggttcttgcattttaagtgtctaaaataatcaatgtctctcaagttcctgaggtgcctaagaaggtggaagaaaaacgaatcattctccctaaagaagaggaagttctaccagttgaaggtagataactttctaagaaaataacatttcaaagtcatccttgtcttattattgtctaatatttgaagtaggtaaatgtaaaatttaccccaggaaatcaacatattcagattctaaaataaattattattaacctaatagaaattgggcaggcaaattaatattatttgaatctctttgcatgttcagcctgtttgtctgtttgctatttgttttattttaattagaattcatgaagggaaactgtatttgctgtgggaaatttttcatcaaatgacttagtaggcaactgtaaaataagcttatccaagagaaattccagttaagcctgagtaactggtgcagaaaatctgatttctaccccaagtggctgtttgacttcaaacaagtctttcattaaaaaaaaaacaataataatttttttattattataaattatctgaagtcctttccagttcacaaatgctgggatatgcctaacatattttgaagacccagtagagattttttaaggactagtgagtttacacaagcgtttcgaaggctgagcagttttcagatattatcactgtagtctaatattcaaaataattataaaaataatttacaaaataataatctttttaaagtgactgaggagcctgaagaagagcctatttcagaagaagaaatcccagaagaaccacctagcatagaggaagttgaagaggtggcaccacctagaggtataaccgcttttaaggattgaacatttaaaattcctggtgttccaaatctttctcagtagctaaatctaagattcaccagtatgcttttcttatatcgtatccatgataaagtgaagattaattattcctggcacctgaatctatgtgtcctttttttaccctaaatttttctacaacatctgcaatacaactaagaatgagagattactattttgttattggcgattgaatttttttctgaccaggccctactataatagtttctcctagatttcaatccttaattttgtttttaatattaatatggggggaatctatttctctggtgaaagtgttcattttttaagaaaaatctttaatttactattcctgaagagtgtgataatattttgcataattggtattacatttgcttataggatttctaagtaatatcctttacacctctagggttcctactccacatttattattaccatttaggttgctaatatcttttaaaaataagtcaatgttttgtgatatttatttattggtatatgggtggtgttctgctcatcacatgccacttttcaaaatgttcataaaatttcttttaagtgcctgaagtgattaagaaagcagtacctgaagcacctactcctgttcctaaaaaagtggaggcaccaccagctaaaggtatatcaaatcctcattattaatatctttaacttcccattaattttctttcttaaaagcaacattttcttttttgactgccttcttataatcatttagatagtgaactgattaaggaccagtaaaaatataactcattccatttctttaatcttttctaggatgttaacgaataattgtgtgcatgtgtttacgtatgaattattctagaagcttcttaactgagaattttaatatattagtatgtctctatatacttatacacatagcaatggatccctcttccccacattttagattttattccataagtggaacggagttttcttctgtgttataataattattttactatatttattattttatggaacaaacctaatgcttggataataactattttaaagagcctcacgtcccttttgtaatgtttagcccaagcattcaaggttattacaaaatgtctacttttccctgcttcctaattcacttaatgcttcagacagtgctcttaagcagttagattatgctgtccctgtcatagtagactcctcagctaatagaagagtgcacagcagaaagtgaggccagtgtcagggcttaaatactctacaatggtaatcacttcaaaaaagtcttcatcaagttaaaaatagtaaaagtgagtccatattggtaatccctgttattaaaagaaaaaaaaaagaatggcacaggtactttgtggacatttcttcttctataggaatgttagaacaaatgagtgatttgagaaagtatctttattgcctctaaaatggatgtcccacagtacagagtgacttctgaaaaactttaattattgtaatgttggcgttgtctctggtgtttttatttcatgtgtgttattgaacattctcagctaactaaaacacctaatatctttaaagtgtcaaagaaaattcctgaggaaaaagtacctgttcctgttcagaaaaaagaggcacccccagccaaaggtacatcttctcttttaaacctgacttcctcttctgtcttttttcgttaagacttttatgtttcatgtctctgtgtcttgattgtttttgatgatttttgtctatgaaagcttgctctcgacagtcctaaatattaaaactgtatctttaaagtgcctgaagtaccaaagaaagtcccagaaaagaaagtccttgtgcctaaaaaggaagctgttcccccagctaaaggtatttttggaaagatcctggattttcgtgtattgttgcatgcaatcctttattcagttttaaaaatatatattttgaatgtacatctttatttcttcagtgtttaaaaaaataagtcttaaaatagatgctctttcagggagaactgtccttgaagaaaaagtatcagttgccttccgccaagaagtagtagtaaaagaaagactagaattagaagtagtagaagcagaagtggaagaaattccggaagaagaagagttccatgaagttgaagaatattttgaagaaggcgagtttcatgaagtagaagaattcatcaaattagaacaacatagagttgaagaagaacacagagttgaaaaagttcatagggtaatagaagtttttgaggctgaagaagtggaagtatttgaaaaaccaaaagctccacctaaaggtatagggaattcttcaaatactacaaattcttatatcttgctctaactttcctttgaaagtaaattttgtgttcagtttggaagattagaaaccccatgaaatactttaaacatgagtttaaactagttgacacaaagattaatatctcttaaccacacggagtataattttagtagatgatagtaatatttgatatctacttatctaaggaggtcactgtatgaatttggggattattttttaaatctgactaagaatgttacacaattgttacaggtaccaaaataactgaccagtgtcattggttaagtgaaaaagaaactcctcagttcactgaggaatttacatgttcaggcaaaataatcactgctttaacattttagtcaactgttcacaaactgagaaatacttaccaaaagcttttgccagtttatgatactttcattagagaaacaacattaaggaagtgaagtattgttaatggcacctgtattctagcatactgtgaagacaagccatagcacaaataagttatctgcaataccactctagatcttgcacaaattaacaatatatgtgtaatatgaaggaatgtgtgtgtgtgtgtgtttagcatatatagcaaattacaatatacatgatatttagcaaatcaaatctcttttggaaataagtgtgttataaattaaaaaaatatagataaagaattttgtgacccctcattgtactaacgttagtagtagtgctccaaaatacttcaagagttcattctaaaccaaaatactaatatctttgaagggcctgagatatctgagaaaatcatccctccaaaaaaaccgcccactaaagttgttcctcgaaaagagccaccagctaaaggtatcttctttgtgaaaaattactacttaactttacatacaatagcaccttggttgctttataagcacaagtttgcattccacttgatgtctttcttctgtatttcttgtttctgacatgtctaaaacaaactaatatctttaaagcagctgagggtccaagggaagttctaccaaaaaaagacagtcactgttgttatacctaaaacaaccaaagcaaatatctctagtaaccaaatagtgagcccaaatttcctcctttggtgctatttggttatatattcactaacatgcttactgataaacacatgtttttctatttattattaattatattaacctggcaaatataaatacatagtgaatatgtgtttaatgttcttgctttgttcatttttgcaaatctcttaaatttcacaatagaaataaaaacagtatctaataaataatataaacttatttctttaaagtctctgaagcatgtgcgtaagttatcactgaagagaaggtagcaactcttccacaaaaacaaacagtaatagcaccagctgaaggtgtactgttaatttttcttctcaagttcttaccattctaacatgggaaatttccctggatttttgttattatatattttttaaattcaatgcatttgaaatactgtaatgtatttgataaagtgttgtctgcattttatattgttgctgtgttctgttctgtgtttatatctctcatgctctgcttgttaaaaaattgtatatttaaaaataaaagaaattattactattatctttaaagtaccggaggtgcctaagaaaattgtggtagaagaaaaagtacgtgttcctgaagagcccagagttccaccaactaaaggtaactggcttttctcattcatcattaatataaaatccttttttattcacttactatgtaagagagacctttctcttctcaatgccacaagatggctatgaatgacataaacttcaatttatgttctataacataatcctgccttttgaggcaatgttttaggcgtaaagacataagcccaaagttatcatttgtattgatcctcttatttaataactaaataatattgatccctcaacttctctttcaaaaataattcattttggaagctcttctgaagtagctctggaaaaaaaaaagtgtgctctaaatggcaatagaaaatgatactatctccaaagagcaaagtgtttctgatataatgaatcaagaactcatcgacaaagcaattcagagaaatgcaatgactacatttgacttatagttgacttataattgaggggtttttggcgttcatcttgttagatgccccttctaggcttgctatgtttacacccaactataatgttctgaaaaaataagataaataaatatctttaaagcacccgaagtacccaagaaaattgtcccagaagaaaaagttcgtgaagctgttctgaaaaagcctgaagttccaccagctaaaggtatacagtgatgctaatcagaacatgaaataattcttggtttagtttttcatggtttaaagtgaatgtgtgtgacattaaatccttgtatttcgtatcttatatttgttatctgtaacaattaatatactaatatctttaaagttcctgggatgcctaagaaaagtgttcaagaagaaaaatcacctattgttatttctgaagacacagagatgtacagtgagtgtagaaaaattagtggttctttttcgtttcatttatgtccttaaattcactatgtttgtctttttagctttgaaaagtaaatatactaaactcttataaaagcctaacatgccacaaatatatgactcaaataatcttagtgtctattatcctcagacaagttatatttcctcaccaatttaaaaaagaaatactctacttatcagagtgtatgatttcagaaaagtcagttgtcttgttaaattttcctaacctattctgtatacaagtgtcttttgctttgaagcaatttattttctcagatcatgaagtaacttaactccataatattttaattggattttataaaatcaaaatgtttcaccattatttttttttttactcttgataaccataattggaaacattttggcaaaactgctcaaaggaccctaggtttacaaggccactcaaacctcaaaagaattctcacgacctttttttttgggggggggtttcatacaaaattaggtttaaataatttgaattatgaaataatccaaatagtaaaatattgtgaatagaatactgttcaacaacctgaatagtaaaagtgacagtagtcaaaatattcttccttttttttttttttttgagatggaatctcactctgctgcacccaggctgcagtgcagtggcacgatcttggctcactgcaacctccgtctcctgggttcaagctattctcctgccccagcctcccgagtggctgggattacaggtgcctaccaccaggcccggctaattttgtgtatttttagtagagacagggttttaccatgttggtcaggctggtctcaaactcctgacctcaggtgacccgcccacctcagcctcccaaagtgctgggattacaggcatgagccactacaccagacccgcttccattttttttaatctaaaaaatttcctgttgaaactcaactttcttgttgttcatcctgttatactaagttgggataaaataatataatcacttcctcctttgaatatcctttctattcttgactttagttattgttttcagacagtttttctttctaaaggctggagaaatttttgttgtctttatttgccttattttctaagtatttaatttttttaattttctgcctccaaaccctaaatggcttttacattcatattaaactgtgaaaccatatattagatgtgatttgaaaatatagataatgaggcttctagaaagggaaaagacttacatgaatttctagtaggtcaaatatcggagaattctcaatgtgcaattcagcatcttccctgttctttatagacaaatccattaaaaataagaccaataggacaattttaccaataactttcttaaggcaaaatgaagaattatatagtccttgcctgaacaattcctccattttattatcatcatcatagagaaatgcttagagtcttacatcatgaaactgggagtgaggctatccccagccaatgcattctagccactaatttgcctctatgtgctactattaattttggtgatgaatgtggtattatatattatatttttcttaatacacttctttatccaccttgaaacatcctaattatttaaatactaatatctttaaagtttatgaagcatctgaagaagcagtcctagaagaaaaagtacttgtgactcaacctcaaaagacaaaacccaaactagcaaaaggtatataacaccaatgatccactctgaagaaaaattattttttggccccttttaaaaagctcaatatttttcttcaccatttataaatataactatactcatatcttttaagtgcctgagccacccaagaaagttgttccagaagacaaaatatatgtgactattcctaaaaagagagaaacaccagcaactaaaggtatatttcaaatacatcaaacccagatgagtatctttagctttatgactcaaacattgcatgctttttataatttactgtttttacaacttttaaatgtaaacctactaatatctttaaagaacctgatacaaccagaggcatttttccagaggtggagccacctgaggctattcctgaaattccagaacatcctccaactgaaggtataattctctagttaggaaaatctaaagaagaaaatatactgtcttcagtctgcaaaatatttaatgtttaatatacattctcacaacctctaatgttaaaatactgtgtttaaaggatctgatatacccacaacaaagaatgacctatgacttgcccccaagaaagtcaagtcccacacatataatatacaaagataaaatattagaacaaaaataacatttctaacataaagatatctgaaatgatattaacatatctaactttcttagtatgtcatgtctttatgcctttgccttttctcaattaaaaaaaatactaatatctttaaagagtttgaagtcttcaaggaagtcattccagagggagaaactcctattgttaaaagaagaaaaacaccatcaccaacaggtacaagttggaagaaagtcacctttttaatctcatgtttgcagttgtacttaacacatgtaaaaatactaatatcttttaagccaaagtggctacagtggaaatcatttcagagatggatcccccaagtagaagctcaaccaaatgtattcatgtcccagtgagtcactcaagagacaacagagggaaaaaatacctttagcttatacacatgaaagatagttgagtcagtgtatttttatgaggactccaaagaaaatatatatacacatattatgatcaaaacatgtcttaaagaaaatattaattcagtgtgaagctgatctgtaatatctctacaagattagagcacctgagaccctcccagaatatcctccaacctagggaaaaataattccagttaaagctggaaatctcccctccatgttcatttgctcctctcatagcctatcttttatttttcaagcatcattttttttcattttgaatatctttagataagtcaaaacatgaaaaagctttaaaacctccagaacaataatttcatcataacacccatggtattctgtaatttgaagaatatctgaatattttgatattttttctcagtctggaatcttttggttgttctcctctctcctaaacttgaaaaacactcacctttttaaggtgcctgaggtgtgaatacaaaaaaatgccgacctagatttttcgaagtggctgtaatttgtttttctcaacataatagctagaggtatagcattaattataatcaatgtttccactttccatgatctagttttctatgcatctaccattccaagaaataaaattactaatactgatagtgcctgaggtgaccaagaaaacagccgcttataaccaaatactcacactgctacaaaagatccgattctgggggcggggagtgggagaaggttcccatctggaatgttctgtatgtgcagttaagatgggaactctttactcctcttcataactccaaagtacaatgcattcatatctttaaagtgcctgaatcacctcgagaaattgtccctgtaaaggaaacacccatggctgctccccttgaaattgaaatacctcccactaaaggtatcgttcatcctgccattccttccttcatttattagagtgcttagcatgtacagggtgctagggaactggagaataataaacaaagacaattaatatgtggttcctctcctcaagattgtatacctcctcagattctttaaaggaatcatctttttagccataaatatcactttggttcagctcatttaattaatgtctccactgatccttttaacctctaaccataatactaatatcttcaaagcaccagaagctatgaaagaagttgtccctgaaatgaaaatatttgaggatgtacctgaagagccagaaactccacgtatgaaaagtacgttacctctgaacaaatgtggaagaagaaattatctgtcctctgctcttaaaactatggtttcttcctaatactcttcataaattctaaatataaacatactaatatcttttaagtgtctgaggttccacaggaagtttcctctaaaaagaaattatttatggctgtttctgccaaaacagaaaacactcctgctggaagtattcattcaacaaatcctttataatgagagtgtagagtgtcgcgagagctctgtgaggttctggaggagggggagcacctcctctcaaggatccactaaccccttaaaagacttagcctattggtggaacaaagggaggatggaggaaagagaagaaaatgtggttatatttcctaacttattgtggttactgttttccattaatcattttaactcttaaatgtgaattgctaatatctttcaagcgcccgaagctcctcaagaaattattcctgccaagacagttccttccaaaaaaagagaacccccatcagttaaaggtacaagtcaccatgctctcagggtcaagaactagctcttgtagttttgagaatatttttgctattcctagttatctgcataacactaaacataaaactactaatttcttaaagtgcctgaagctctccaagaaattgtccctgaaaagaaaacgcttgtggttcctctcagaaagcctgaagtccttcctgatgaaggtatatcttgctggaagcttagaggggtgggaacatgtcttttcttgtataaatgtttttcctgattgtgttgattcttgtaacttctaaatgtaaaattattaatatcttcaaagtgccggaggctctcagagaagttgtcccggaaaagaaagtgcatcctccccaaagggctgaagttgtacctgtcaaaggtacattcttaactgtctttttatggtgggatagtgggtggggcgatagaaaggaccacctttctagttttgaaaattattttgatgtgtacatgtgaatcatgtctgtgttgactcttgcaactcaagtgtaaatgtattaatatcttcaaactgcctgaagctcccaaagaaatggctaccaaaaagaaaataccggaagttcctcctctaaaacctgaaacaccacctattatgggaacttgttaccactgatctcagctcaggagaaaaaaatagctcttttgttcttgaaaatgtctttgtatctatctagtaatctctgtattttctgagtgtaaaaatactaatatctttcaagtgcacgaagctcccaaagagattatccctgaaaagaaagtgtcggtggtgcctcctaaaaagcctgaagtcccacctgttaaaggtatttgtcactgactttaggcttcagaagacctaattcttctgctcttgacaatatttttttctagcggtcttcataacacctaaatgtaatttcactaatatctttcaagtgccagaagcttccaaagaggttatccgcgaagagaaagtgcccttggctcctcctaaagagcctgaagtcccacctgttaaaggtagttgccactgaccttaggcttcagatctcattcttttgctcttgaagatattttttccagtggtcttcataacttctgaatgtaattttgctaatatcttttaagtaccagagcctcccaaagaagtagttcctgaaaagaaagcgccagtggctcctcctaaagagcctgaagtcccacctgttaaaggtatttgtcactgattttaggcttcagatgatgtatctcttctgctctggaaaatatttttctagtggtcttcataatgcctaaatgtaatttcactaatatctttcaagtgcctgaggctcccaaagaagttgttcctgaaaagaaagtgccagtgcctcctcctaaaaagcctgaagtgccacccacaaaaggtagacaccctcttgttgctgtgtttgatattgtttgtttgtctttactttgtctaataatgaaaatactaatatctttaaagtcccagaggtgccaaaggcagctgtcccagaaaagaagttgcctgaagctattcctcccaaaccggaaagtcctccccctgaaggtaatgccaaagctatacaaactataggagaaaaataactgttattttaactaggaaattacatgttaaaaatcctactacataaagatgatataattctaaagaaaacaaatgtcaatcgctatccaaaatatcttggtgggtgtttatatgcaaaaggcatccatcattttcaccttttctaaacacaaattacaaatatctttgaagtgcctgaagtgctgccaccgaaggaagtggtcccagaaaagaaagtaccggtgcctcctgccaaaaagccagaagctccacctcctaaaggtaggtatcattacacattgtcagtcggggggccctggggaaagactgcatagaagtgtccgccgatctcacaagttgtatttgcttgggtaaatgtggagtcgatattccccctttatagcttctaactaaaagatactaatatcttcaaagttcctgaagctcctaaagaagttgtacttgaaaagaaagcatctgtggctgtgcccaaaaaaccggaagccccacgtgcaaaaggtatttattccctctcctctgctaagaaaaacttatcgtctgtacccctcacaatcactgtaatatataccttcaccattcataaattataaaaatactaatatctttcaagtgcctgaagctgctcaagaagttgtcccagaaaagaaaattcccaaggcaccaatcaaaaaaccagaagcccccgcagttacaggtacatgtcagctcaaccttatcctgcagaagaaatctctcttccattcctgaaaacaattttagtccattcctcttcattaacctaagtataaaactactaatatctttcaagtgccagaagttcctcaagaagccacagaaaaagaaattcccgtggctccacccaaaaaaccagaagctccaattgtcccaggtacactttagccctgacttcattctgcagaagagatatctcctctcctactgtaaacaattttagcccatttctcttcattaacttaagtctaaaactactaatatctttcaagtgcctgaagctcaagaagttgtcccagaaaagaaagttcctaaggctcctcccacaaaaccagaagccccacctgccacaggtattttttacccctgtcctttttctgcagaagaaatatctcttctgatcttagaaatattttactccatttgtctcattaacctaagtgaaaaactactaatatctttcaagtgcctgaagtcccacaagaaattgtgccagaaaagaaaacactggtgcttcctaaaaagccagaagttccacctgttacaggtacttgtcatttgaccttaagcttcagaagatccaattcctctgctgtatattttgctagtagtctccatagctccacatgtaactttactaatatcttttaagtgccagaggctcccaaagaagttgtccttgaaaagaaagtgccctcggctcctcctaaaaagcctgaagtcccacctgttaaaggtatttgtcactgattttaggcttcagatgatctatctcttgtgctctggaaaatatttttctttttatatatatatatatttttattatactttaagttctagggtacatgtgcacaacgtgcaggttgttacgtatgtatacatgtgccatgttggtgtgctgcacccactaactcgtcatttacattaggtatgtctcctaatgctatccctcccccatccccccacctcacaacacactccggtgtgtggtgtcccccttcctgtatccatgtgttctcattgttcaattcccacctatgaatgagaacatgcaatgtttggttttttatccttgtgatagtttgccaagaatgatggtttccagtttcatccatgtccctacaaaggacatgaactcatcattttttatggctgcatagtattccatggagtatatgtggaacattttcttaatccagtctatcattgatggacatttgggttggttccaagtctttgctaatatgaatagtgccgcaataaacatacgtgtgcacgtgtctttatagcagcatgatttataatcctttgggtatatacccagtaatgggatggctgggtcaaatggtatttctagttctagatccctgaggaatcgccacactgacttccacaatggttgaactagtttacagtcccagcaacattgtaaaagtgttcctattgctccacatcctctccagcgcctgtcgtttcctgactttttaatgatcaccattctaactggtgtgagatggtatctcattgtggttttgatttgcatttctctgatggccagtgatgatgagcattttttcttgtgtattttggctgcataaatgtctttttttgagaagtgtctgtttgtatccttcgcccacttgttgatggggttgtttttttcttacacgtttgtttgagttcattgtagattctggatattagcccttcgtcagatgagtagattgcaaaaattttctcccattctgtgggttgcctgttcattctgatggtagtttcctttgctgtgcagaagctctttagtttaattcgatcctatctgtcaattttggcttttgttaccattgcttttggtattttagacatgaagtccttgcccatgcctatgtcctgaatggtattgcctaggttttcttctagggtttttatggttttaggtctaacatttaagtctttactccatcttgaattaatttttgtgtaaggtgtaaggaagggatccaatttcagctttctacatatggctagccagttttcccagcaccatttgctaaatagggaaccctttccccatttcttgtttttgtcaggtttgtcaaagatcagatggttgcagatgtgtggtattattctgagggctctgttctgttccattggtctatatctctgttttggtaccagtaccatgctgttttggttactgtagccttgtaatacagtagcgtgacgcctccagctttgttcttttggcttaggattgacttggcaatgtgggctcttttttggttccatatgaactttaaagtagttttttccaattctgtgaagagagtcattgatagcttgacggagatggcattgaatctataaattaccttgggcagtatggccattttcacggtattagttcttcctatccatgagcatggaatgttcttccatttgtgtcctcttttatttcgttgagcagtggtttgtagttctccttgaagaggtccttcacatcccttgtaagttggattcctaggtattttattctctttgaagcaactgtgaatgggaggtcactcacgatttggctctctgtttgtctgttattggtgcataagaatgcttgtgatctttgcacattgattttgtatcctgagactttgctgaagttgcttatcagcttaaggagattttgggctgagacgatggggttttctagatatacaatcatgccatctgcaaacagggacaatttgacttcctcttttccttattgaataccctttatttctttctcctgcctgattgccctggccagaacttccaacactatgttgaataggagtggtgagagagggcatccctgtcttgtgccagttttcaaagggaatgcttccagtttttgcccattcagtatgatactggctgtgggtttgtcataaatagctcttattattttgagatacgtcccatcaatacctaatttattgagagtctttagcatgaagggctgttgaattttgtcaaaggccctttctgcatctattgagataatcatgtggtttttgtcgttggttctgtttatatgatggattacgtttattgatttttgtatgttgaatcagccttccatcccagggatgaagcccacttgatcatggtggataagctttttgatgtgctgctggaaaatatttttctagtggtcttcataatgcctaaatgtaatttcactaatatctttcaagtgcctgaggctcccaaagaagttgttcctgaaaagaaagtgccagtgcctcctcctaaaaagcctgaagtgccacccacaaaaggtagacaccctcttgttgctgtgtttgatattgtttgtttgtctttactttgtctaataatgaaaatactaatatctttaaagtcccagaggtgccaaaggcagctgtcccagaaaagaaggtgcctgaagctattcctcccaaaccggaaagtcctccccctgaaggtaatgccaaagctatacaaactataggagaaaaataactgttattttaactaggaaattacatgttaaaaatcctactacataaagatgatataattctaaagaaaacaaatgtcaatcactatccaaaatatcttggtgggtgtttatatgcaaaaggcatccatcgttttcaccttttctaaacacaaattacaaatatctttgaagtgcctgaagtgctgccaccgaaggaagtggtcccagaaaagaaagtaccggtgcctcctgccaaaaagccagaagctccacctcctaaaggtaggtatcattacacattgtcagtcggggggccctggggaaagactgtatagaagtgtccgccgatctcacaagttgtatttgcttgggtaaatgtggagtcgatattccccctttatagcttctaactaaaagatactaatatcttcaaagttcctgaagctcctaaagaagttgtacttgaaaagaaagcatctgtggctgtgcccaaaaaaccggaagccccacgtgcaaaaggtatttattccctctcctctgctaagaaaaacttatcgtctgtacccctcacaatcactgtaatatataccttcaccattcataaattataaaaatactaatatctttcaagtgcctgaagctgctcaagaagttgtcccagaaaagaaaattcccaaggcaccaatcaaaaaaccagaagcccccgcagttacaggtacatgtcagctcaaccttatcctgcagaagaaatctctcttccattcctgaaaacaattttagtccattcctcttcattaacctaagtataaaactactaatatctttcaagtgccagaagttcctcaagaagccgcagaaaaagaaattcccgtggctccacccaaaaaaccagaagctccgattgtcccaggtacactttagccctgacttcattctgcagaagagatatctcctctcctactgtaaacaattttagcccatttctcttcattaacttaagtctaaaactactaatatctttcaagtgcctgaagctcaagaagttgtcccagaaaagaaagttcctaaggctcctcccacaaaaccagaagccccacctgccacaggtattttttacccctgtcctttttctgcagaagaaatatctcttctgatcttagaaatattttactccatttgtctcattaacctaagtgaaaaactactaatatctttcaagtgcctgaagtcccacaagaaattgtgccagaaaagaaaacactggtgcttcctaaaaagccagaagttccacctgttacaggtacttgtcatttgaccttaagcttcagaagatccaattcctctgctgtatattttgctagtagtctccatagctccacatgtaactttactaatatcttttaagtgccagaggctcccaaagaagttgtccttgaaaagaaagtgccctcgactcctcctaaaaagcctgaagtcccacctgttaaaggtatttgtcactgattttaggcttcagatgatctatctcttgtgctctggaaaatatttttctttttatatatatatatatttttattatactttaagttctagggtacatgtgcacaacgtgcaggttgttacgtatgtatacatgtgccatgttggtgtgctgcacccactaactcgtcatttacattaggtatgtctcctaatgctatccctcccccatccccccacctcacaacacactccggtgtgtggtgtcccccttcctgtatccatgtgttctcattgttcaattcccacctatgaatgagaacatgcaatgtttggttttttatccttgtgatagtttgccaagaatgatggtttccagtttcatccatgtccctacaaaggacatgaactcatcattttttatggctgcatagtattccatggagtatatgtggaacattttcttaatccagtctatcattgatggacatttgggttggttccaagtctttgctaatatgaatagtgccgcaataaacatacgtgtgcacgtgtctttatagcagcatgatttataatcctttgggtatatacccagtaatgggatggctgggtcaaatggtatttctagttctagatccctgaggaatcgccacactgacttccacaatggttgaactagtttacagtcccagcaacattgtaaaagtgttcctattgctccacatcctctccagcgcctgtcgtttcctgactttttaatgatcaccattctaactggtgtgagatggtatctcattgtggttttgatttgcatttctctgatggccagtgatgatgagcattttttcttgtgtattttggctgcataaatgtctttttttgagaagtgtctgtttgtatccttcgcccacttgttgatggggttgtttttttcttacacgtttgtttgagttcattgtagattctggatattagcccttcgtcagatgagtagattgcaaaaattttctcccattctgtgggttgcctgttcattctgatggtagtacctttgctgtgcagaagctctttagtttaattcgatcctatctgtcaattttggcttttgttaccattgcttttggtattttagacatgaagtccttgcccatgcctatgtcctgaatggtattgcctaggttttcttctagggtttttatggttttaggtctaacatttaagtctttactccatcttgaattaatttttgtgtaaggtgtaaggaagggatccaatttcagctttctacatatggctagccagttttcccagcaccatttgctaaatagggaaccctttccccatttcttgtttttgtcaggtttgtcaaagatcagatggttgcagatgtgtggtattattctgagggctctgttctgttccattggtctatatctctgttttggtaccagtaccatgctgttttggttactgtagccttgtaatacagtagcgtgacgcctccagctttgttcttttggcttaggattgacttggcaatgtgggctcttttttggttccatatgaactttaaagtagttttttccaattctgtgaagagagtcattgatagcttgacggagatggcattgaatctataaattaccttgggcagtatggccattttcacggtattagttcttcctatccatgagcatggaatgttcttccatttgtgtcctcttttatttcgttgagcagtggtttgtagttctccttgaagaggtccttcacatcccttgtaagttggattcctaggtattttattctctttgaagcaactgtgaatgggaggtcactcacgatttggctctctgtttgtctgttattggtgcataagaatgcttgtgatctttgcacattgattttgtatcctgagactttgctgaagttgcttatcagcttaaggagattttgggctgagacgatggggttttctagatatacaatcatgccatctgcaaacagggacaatttgacttcctcttttccttattgaataccctttatttctttctcctgcctgattgccctggccagaacttccaacactatgttgaataggagtggtgagagagggcatccctgtcttgtgccagttttcaaagggaatgcttccagtttttgcccattcagtatgatactggctgtgggtttgtcataaatagctcttattattttgagatatgtcccatcaatacctaatttattgagagtctttagcatgaagggctgttgaattttgtcaaaggccctttctgcatctattgagataatcacgtggtttttgtcgttggttctgtttatatgatggattacgtttattgatttttgtatgttgaatcagccttccatcccagggatgaagcccacttgatcatggtggataagctttttgatgtgctgctggaaaatatttttctagtggtcttcataatgcctaaatgtaatttcactaatatctttcaagtgcctgaggctcccaaagaagttgttcctgaaaagaaagtgccagtgcctcctcctaaaaagcctgaagtgccacccacaaaaggtagacaccctcttgttgctgtgtttgatattgtttgtttgtctttactttgtctaataatgaaaatactaatatctttaaagtcccagaggtgccaaaggcagctgtcccagaaaagaaggtgcctgaagctattcctcccaaaccggaaagtcctccccctgaaggtaatgccaaagctatacaaactataggagaaaaataactgttattttaactaggaaattacatgttaaaaatcctactacataaagatgatataattctaaagaaaacaaatgtcaatcactatccaaaatatcttggtgggtgtttatatgcaaaaggcatccatcattttcaccttttctaaacacaaattacaaatatctttgaagtgcctgaagtgctgccaccgaaggaagtggtcccagaaaagaaagtaccggtgcctcctgccaaaaagccagaagctccacctcctaaaggtaggtatcattacacattgtcagtcggggggccctggggaaagactgtatagaagtgtccgccgatctcacaagttgtatttgcttgggtaaatgtggagtcgatattccccctttatagcttctaactaaaagatactaatatcttcaaagttcctgaagctcctaaagaagttgtacttgaaaagaaagtatctgtggctgtgcccaaaaaaccggaagccccacgtgcaaaaggtatttattccctctcctctgctaagaataacttactgtctgtacccctcacaatcactgtaatatataccttcgccattcataaattataaaaatactaatatctttcaagtgcctgaagctgctcaagaagttgtcccagaaaagaaaattcccaaggcaccaatcaaaaaaccagaagcccccgcagttacaggtacatgtcagctcaaccttatcctgcagaagaaatctctcttccattcctgaaaacaattttagtccattcctcttcattaacctaagtataaaactactaatatctttcaagtgccagaagttcctcaagaagccgcagaaaaagaaattcccgtggctccacccaaaaaaccagaagctccaattgtcccaggtacactttagccctgacttcattctgcagaagagatatctcctctcctactgtaaacaattttagcccatttctcttcattaacttaagtctaaaactactaatatctttcaagtgcctgaagctcaagaagttgtcccagaaaagaaagttcctaaggctcctcccacaaaaccagaagccccacctgccacaggtattttttacccctgtcctttttctgcagaagaaatatctcttctgatcttagaaatattttactccatttgtctcattaacctaagtgaaaaactactaatatctttcaagtgcctgaagtcccacaagaaattgtgccagaaaagaaaacactggtgcttcctaaaaagccagaagttccacctgttacaggtacttgtcatttgaccttaagcttcagaagatccaattcctctgctgtatattttgctagtagtctccatagctctacatgtaactttactaatatcttttaagtgccagaggctcccaaagaagttgtccttgaaaagaaagtgcccttggctcctcctaaaaagcctgaagtcccacctgttaaaggtatttgtcactgaccttaggcttcagatgatctaattcttttgcagttgaagacattttgttccagtggtcttcataacccctaaatgtaattttacctaatatcttttaagtgccagaggctcccaaagaagttgttcctgaaaagaaagtgccagtgactcctcctaaaaaacctgaagtcccacctgttaaaggtatttgtcactggctttaggcttcagaagactgaactcttcatttcttgaaaatacttttctagtggtcttcaaacttctaaatgtaatttcactaatatcttttaagtgccagaggctcccatagaggttgttcctgaaaagaaaatgcccttggctcctcctaaaaagcctgaagtccctcctgttaaaggtatttgtcactggctttaggcttcagaagatcaaactcctctattcttgaaaatattttttctagtggtcttcataacccctaaatgtaatttcactaatatcttttaagtaccagaggctcccaaagaggttgttcctgaaaagaaagtgccctcggctcctcctaaaaagcctgaagtcccacctgttaaaggtatttgtcattgagtttaagcgtcagaagatctatctcttctactcttgaaaatatttttcctaatggtcttcataacttctaaatgtaatttcactaatatcttttaagtgccagaggctccgaaagaagttgttcctgaaaagaaagtgccagcggctcctcctaaaaagcctgaagtcacacctgttaaaggtatttgtcactgattttaggcttcagatgatcaaactcttctgctctggaaagtatttttctagtggtcttcataatgcctaaatgtaatttcactattatctttcaagtgcctgaggctcccaaagaagttgttcctgaaaagaaagtgccagtgcctcctcctaaaaagcctgaagtgccacccacaaaaggtagacaccctcatggtgctgtgtttgatattgtttgtttgtctttactttgtctaacaatgaaaataataatatcttttaaagtcccagaggtgccaaaggtagctgtcccagaaaagaaggtgcctgaagctattcctcccaaaccggaaagtcctccccctgaaggtaataatgaaactattcaaattagtgttttttaaaaaaatctttccttagtgttgtaaaaacatttttttgcaaactatctcagttttagtcaattctggcattaaaatgagctcatgtctttaaagtgttcgaggagcctgaggaagttgccctagaagagcctcctgctgaagttgtggaagagccagagccagcggcgcctccacaaggtacatggcaagaaagctgctaggacacctcggccactctttccccttcctgccctgataattctgggtgctctgagcttttgtcttgtttctcaatcttcgttctttctaaaacataccttctaattctttagtgaccgtaccacctaagaaacctgtcccagaaaagaaagcacctgctgtcgttgccaaaaaacctgaactaccaccagtgaaaggtattcctcactgccactaactccctaacaaaaaactttctttgaagtgtcatattctactgttctgcttcatgattttcacatttcattgaaaccatgagcttaaacaactactaatatcttttatagtgcccgaggtgcccaaggaggttgttcctgaaaagaaggtgcctctggtggttcccaaaaagccagaagccccacctgctaaaggtatatgtggctgtccactgtttgatgggggcggatggagcccccagcttctaaaagggttttgttctgtgtaaatgtgatgaatgtttactggtgattgtttctaatgttaaaatactaatatatttgaagtgcctgaagttccaaaagaagttgttccagaaaagaaagtagctgttcccaaaaagccagaagtcccaccagcaaaaggtacatgtcactaatgagattctgcagaaaagcactcacccttgtctaataagtcacctattatcaaaccttttgtttgcgagtcctcttaaatttgcaactacaaaactgtcattctggatttttagggtctgaatactttttaataattttttcattgactttaaaaagtgatatatttacttattacaagcattggaaaagtttactaacttggttcttttattcttaataggccatattttcctccccactatatgagggtccaaagacagatcactgaccttattgtgaaatttgttcttggatctgtccctgggttatttgagcaaaatgtgaagtcgatgtggtataaatttaatatacttctcaactactcataagaaaaatgaattaatatctttaaagtgccagaagtgccaaagaaacctgtcttggaagagaaaccagctgttcctgttccagaaagagcggagtctcctcccccagaaggtacacgtgagaccggtgattaatgaccttgccacttgcgactatttctaatttaagctttgttcttcttccttcctaactcattatttcttggtcattttctaacctttaattatttgtcttaattcatcattctaaattagctccaatctcaaatctattttgggttattggtccacagtatctacataagtcatagtaagctatattaaacaaagcttctccaatgtacatagaaagtaaggcaggagaactaatgattataaatgacattaaacactaaaagggctttgcaagcatttgaatcaatagacaaagaagtcagtgcaaatgagatagattttatctaaacaaaaataagagaaggtatcaattgaaacaaaggaagaaatcaagattactatttatcgtgtttagtgtttgtccatcttagaatattgttccatacattgaaataaaattaactaatatctttaaagtatatgaagaacctgaggaaattgctcctgaagaggaaattgctcctgaagaggaaaagccagttcctgttgcagaagaggaggaaccagaggttccacctccagcaggtacaaagcagaatccactgtatgggaaaatacagtcatttcatttttcatgtctatatatcttccttaaggcaaaatatcagtcttgtatcttgttgcctgaaatctgactacattaagaacaaaagttatttctacacataaaactttggacccacagaatttggtcccacatataccaagaaatatgtgtggtttttaattcattcattagcattaaatttttcattgtaatcacctaattctaaaagaaattcctattattcaagtgcctgaagagcccaagaagatcatcccagagaagaaagttcctgtcatcaaaaaaccagaagcaccgcctcctaaaggtactcatgttaaaatgaatacttcatttttgtggtgtctacaattttacactcttcttattgtgtgttgtgttgtattatatgtttgttaactcttacctatatgttacagtgttgaataaacttgtatgtatatcttacatctcacaactttgtattattaaatgctactgatatctttaaagaacctgagatgccaaagaaagttgttccagtgaagaaggtcccaactgttaagaagccagaaacaccagcagctaaaggtattcacttcatcgttggcatcataaaaaagaaagtattctgatatcttaaagtggaatccaataagttgtcctcattgttgttgcataactaaggacaaaaatttccttattttgctttcattaattttaatgctgctccaataaatacaggttttttattcttaatattttaaaatgtttttaaatactatttttaaaacaaaactaatatcttcaaagtgcctgaggtgcccaagaaacttgttccagtaaagaaagaacctgtgcctgttaccaaaaaaccagaagttcttccagaaaaaggtacctaccatgaagaaaaaatagatttctctaactgctatttaagcatgttaataataggtcttagagaaaaacatactgaatgtgaatttatgttaaaaccatattgcacagaaaaaagggaaataatgaagggaaaaaaatgaaacagacaagcaggagtgaaaaaatgagtgggattcagttgtgctgtgatatatcacatggctacaactagtagaaaagaaccttctctcattcaatgtgtaaaacagctcaattcaacatattttgttgaatgttgaccattaacaagacatcatattagaaaaattaaggcctgattctgtcttcaaataagttaaatctggtgagaggatagaaagataacaggactctaatacagacaggaagtgattacacatagcaagtgaatacaaaagggctgcagaaacacacggcaagaaaagattaagttcaggcagaggcatcatgggaagctgtgttaaactgaatttaaattttgatggacttttacatgtagaaattgaggaaataaggccggatgtggtggctcacgcctgtcatcccaacacttggggaggccaaggtgggtggatcacttgaggtcaggagttcaagaccagcctggccaacatggtgaaaccccgtctctactaaaaatacaaaaattagctgggggtggtgatatgtgcctgtaatcccagctacttgggaggctgaggcaggagaattgcttgaacccaggaggcagaggttgcagtgagctgagataatgccactgcactccagcttgggtgacagagtgagcctctgtctcaaaaaaattaaaaaaaagaaattgaggacatgatatcccatggaaagggaagagcatattgaaaggcacagagatagaagggtctagaatgttcaaggattgtcaagtaaacttatgtcaagtaaactcaatttgagtatggattggctgtggaatgtcttgaaagataataccagatataaagatggggtcatattttggagtacttcaaatgccagtaaaaggcttgtacttttttctgtaggcaataggaagcttcaaagattttgaagcaggcttacatattaataggatttgggctttagaaagataactggcagcaatttcagctactaaatagtaaagacccattgcaattatttaaggtctttaagagttggacaagatccgtggcggcagaaatggaaagggggactgggtttgaaagagatggagacttagtggcctctgaccattatcaaaaccattagggaaattgaggagcccaagatcattgtaaggtttaaagctagatggccaaaagaatggttcattgggtctctgaactaacgttagaggaaaatggtagatgtgcttttcacctttaaagcataaaagttgggagtgtgtatcaggagcttaagaaagagatcaggcctagagatgtagatcttaaagtcattcacatgtaaataagaattgagtgtgcaggaacaattactcagaaaatgtagagcaaatttttttaagtgtcaaagttagaccaccttcatttaagtgtacacagaggactagaagcaaatgaagaaagctgagaagattcatatataaaattaggatgtccaaaatggtgccatgtctcagaagccattttccccatgaaatctaagatgaagctcttgcccctgcattctttgcctgctctttagacaatcttgcatgtcttctaaattcttaatagtaaacaaaatcatatctttaaagtgcccaaagtgcctgagaaaatcatcccagaaaaggaagtgtctgtgcctatccctgcagagccagaagttccacctgctgaaggtacacggcttctccataaatcttggaaagatgacaattgtcttcatcctcttgctttgattgtagatgaatcttacgtatttgtctgtctgtattgaagttattgatatttggggggtcatctgaataatctgttatagagtgttacttaatgtaactaggttgatatgttagaatagtagttgcagtattctgttctaaatatagtctaaaataaaatactatgttttttaaagttgaagagactcctgaggaaataatatatgaagaaaaagcatctataaccattggtagaaaagagactccccctgttgaaggtatatatatatatatatatatacatttttttaatctcctgaagattcctgttagaattacaaaagcatttacaggacaatattccttcttgaaattatatacaagagcagtctagcatgtttgactgctttatttttgaaatagttacacttcttttaagttagaatctttaatttagttactgttgttggtaattacaatttccaaaaggtacagtttactgaagcaaaatggaataattgccttggatcctcaaatgataacacggtatcaaattttaaaagtcatctcatttgccatcaatatacattgaataatctaattaataggcagttcaagtaaaagaactttttcttatacgtgaatttttctatacatgaatttgtatgaattgtatatttttattttgtgactgtaatctttgcatcaatgtgaaatttgtatgagtctttttgaagaactttacattgcaacctcatctcctttgtcaacattctttaaagaacgtgaaattgaaaagtatattaaacctgaagagcccgaacctgaaccacagcctgaagaaataccagtaaaaggtattcaatccagtggacttaaatcttctttatcatattctttctcttgaaatgtatatggtttatgttgttgtacatatgtagtatgtctgttcccatttgtatgtaaagtattctttgttgtaaatgtgagcctcattcttaggtttccatgtaacttgtactgtttctctcatgtcaactgtggcttgtctggatgctttgtttgttgttgttattggtgcctttgctgtatttctcatcatctttgtaaagggttgatatttttatgttttatgttctgtgttttatgttggatactggtattacgtaccttaaaaagtaaactttgtacttcatatatatatatatatatatatatatatatatatatatatataatttctattaaatatactacatatccacatgctaacatatacatatactaacacctctgaaatactctttcaagaacctgaacctgaaaaggttattgagaagccaaaactcaaaccaagacccccacctcctccacctgctccacctaaggaagatgtgaaggagaaaatattccaacttaaaggtaaaaaatgccacttccaaagttttattagcctgcttcaaacttctatccagccatctgaaatgatgcttgcaagaaatgtatgacttttagaagtgtgtactttcagacatgattgtactgtgagattgcatagagctgtctcttctgctgccccatggttcctgggttgcttgtcatgccatgcctgctgctgcaaaagtcagaaagtacattgatagcgtcatccgggatatctgaatgcaggcactgtccaattaactttcttttgtggagtggggagaaagagttttctgatttcaaagcctgattgctatacatatcattgcgatcttatgcttaaggaatgtataagaaatccttgcaagatatttttaatattgcagtaacacatttacataaaagccaaaactttgttcttaaagaattgcatgtgcttttaaatatattacaagtaatatagttatgatttccagtagctgatatgtgcctatatatcatgaaaggaaagcatatgaatgacttgttacagttcccccatctctttttttttcttgcaacttaaagaagtgttctgtgtggttctcaggggagctggaaagagtggttatgaagacatttggtatccagcatttattattaaacttcccttcccccttcttatattttgatttttctatgaattgacacaatgttacttaattttaaaaatatcagtttctttaaaagctgaaataaactggcagaaacatattattcttattttaataaaaagttgtcttgtgacgtcatatgattccccaatctaaaattatctagatataatcttagatatgcactttccctatacagacctatgtatcttcaaaccacagtcttccagcataagacattgctgctggtgattcttgccctctacaaccctcatagccattagggggaccttctggcacctcttgaaaggccacccatctgttaattgacactccatgaagacacacacataaatacatttcccttaatgtaaaatatatgcttaaaggaaaatttcttcctcctgccaataacaaaaattgtcttctttttctgctggtctttaattaactactgaactttggagtaaaactgcagtctgttttcatggttcgaatgctgcttgtatgttctttgaaggctgttcttggctgttattaatgctttctggttataagcaaagcttggttttgattcttggagtagaaagttaatcacttgcttcagattaaatatacaaataacaaaagtaaaatcatattctttaaagctattccaaagaagaaagttcctgaaaaacctcaggttccagaaaaagtggagcttacacctctgaaaggtatttcacaggctgaaaaatacatacttatgtagtacccctttacctgactccttgctctttctgcctccatcgaatgttctgtctctctttttcaatgatcagagagtagtcccattcatttcttatatttctgtggcttttatggtcctggctcatgagtgttgcttcctttgtctcccatccatttcatacatgtatagacatggtctatctttgtctcatctacatatgtcttcttgcattttcctaaacttaaaaataacaaattttactggttagccaaaattgatatcaagagacatatgagattaaaatgctgagagctagtagtaaactgttttgacatttcacctgacataaaaattttagccaatgtaataagcactaaaaataagtcctatcttccttttatattattaaggttatttgtagggatttccttaggactttcatgtcactctcttctcactggctctaagtcattctctgaggggtacggaactcacatttcagaaaaatttccttattactgtaggtaatttttcaaaatgtatttttctgtaaacaatattttccctaataaggtctcatctaaaattagaccctaaagaaaactaaatgaattataagagtctagaaaacatctatcaaaaataaacataatttttctaatgggtagtagtgttctgttcaagtaatcaacacattcagacctagaaattaagactgtttctggtcactctgaaattttggggaaaaaagtcacccatataaatatacatttcctgatttcataaagaggcaattacaaaataatgttatcatggatattgatcataaacattaaaatagcatataatcacatataatgactttaaaaataatagctacaatgttgggttctcaaacatcaataagatttttaaaatcaaataataatataaaaaatgcacagatatattttcactatgttcattatatcagtaaagaaaatctatattatgcctcctcactttacattaattagatgcatgtgcttccttctgggtttgagcaataaaaatagttattaagaagattggtacctctaaaatagtattgaaggccaacacaatttatcctggataaaatacgtaatgtttaactttaaaatttttacttaaaatatttgacattaaaaaaatgattattcaaaacgaaatacatatttgcctattgtaggtttaaatttttgaaataagagttaagcagttatctttatcacataaaaaaccatttaatgaattgcaaatatcttgtttaaagccctaaataggaagttttatagaaatatctaaaaattcagattcctaatagcaaatagttacacaatacaaataaatactgttttaaattagattttaattgacattagtagagaggaaaatggtttaataatcaccacgtgttcctttctttcaccattcaaatctatgagggccataatagcaaaagaggctgctctataaaatagcatcatccaccatgctcagtattcactgtagacgcaacaggaaattttgaattccttgcgttccttaatttgaatgaatttaagaacattttcttattcatgaaaaacgagcttccaacaccagctttgaaattttataattctataattttaaatattttatccagcattatttcaaaaaggaaatcttaagaaaggctactcttcttctgttcagaaagtgagatatggcccttccccagcatcaaagtcacaaaccggaactcttggccaccttcttccctcagtggagaagactgaatgatggcactaacacttgccagtatcattttcatacatttagtggttgggtagataacatcgtagatttggacaatctacaattgcagtttgggacaaagatgctgtcaagaaccctgtaatttgatgaaagattcataaagtcagtatggagcaacatcctctacatgcatttaaaatgaatacatttgcctgcagttaatggagttgaatttcatcacaaggctgtatagatatttgcagaggagataacttgaaatgtatcatttaaacttaaattctgtggtatttatatgcagcgaaaattgttacttaatgcactacagttaactagttttaggagagacatttttcttgttgaaattccgtttttatataaattcacttcaaaatttgaaatcatattcttttaagtgcctggaggtgaaaagaaagttcgcaaattacttccggaacgtaaacctgaaccaaaggaagaagttgttctgaaaagcggtatagtatttttcaaccattctgtcagcgttaagtatattttaaaaatgaacttgaaagcttacaaaatgtttctgtcctttggttttctttgaattggttcgctatttatcaaaatttgtttgtagtttcattgaaaattaagaaaaatgtcatttccagatctttttttttaaaaaaaaaagacagaaattttgtgagcattcacagtattttgaaatttaaaatgttaatagacataactaagttgataatattctaaactaacaacaactatgactgccattttcataaccaaattatgtagtaaagtacactaaacctattaaataccttacatgaaactactttagcttaaattcaatattcagttttaaagtgtgacacaggatcaccacaactaataaataacatttttaaaaaactgaacatttctttctgactaataaaatattaaagaatgagaaacaagatagtcaaatgaagaattaagttctaacattgtcttcacatagaattactgatttttaggctacatttcttcagatatctctgcttaagtaaactttctacttatttacatactcattaaatcattaacatttaattattattataattcgttgctattcaaattattcattttgtgttggagctgtttctcccacagacttgtctcagaatagaccctctatctagatagaaacaaagtaactttgagtgctattataattgacaacctttgattttaaaaaaaacaaaacaaaaaacactttcggtgtaaatgcttactttccagagtgctaggtagcatgctttttttcattttccttgctttgtacattatttgcatttgtcaagcttattcaacatcttcattagtttgtcttggtttacatataaacctttttgtctttaaagttctaagaaaaagacctgaagaagaagaacctaaagtagaacctaaaaaactagaaaaagttaaaaaacctgcaggtaggaatctcagtgacaatttgtaagattatcttttaacaaaatggacatttaacaaaaggtttatcttgtaaacataaatgaagttagatgtaaacatggcttcatatttcatctgtgatgtagtctctgttttccattgtctgctttctgtttaaatatttttatagtaattcccaaatccattcatgtatttccctgcacttcattcttatcattactttgcaacttaagttcttccagtagaaatgactgaaataatcaagtggctattcatgggagggtgtcagcaaaggtttcataatctgggggcttttaaatgggttggtttttatcattagcctattctcaaagggcaaaattattgggaactattatagaagtgatttagaaggagagagctaaggggagtggaagataagtggatggaataaaaggaagaaaaataaatggaagcagagtcaagaaaataaaatagaaattacttgataaactataaggttttttaaaaaaccatccatagagtttttgaaaaataaattgatatttcagatgaggtgcttcctaaatattcaaatattaacactgaaaaaataatcttatcttaaagtaccagaaccaccacctccaaaacctgttgaagaggttgaagtacctactgttacaaaaagggaaaggaagattcctgaaccaacaaaaggtacaaatctactgtcattcttagttgtctctaaaaatgcaaatatgtatcatttaaaatatcattacactgacatcaagatttgaacacatgaccttaatctgttaatcacatatggcttaattttctttaccatctcactctcctatgcaattggctaatgattactcagttgctaaataagttacctgaaaaaaaattgtatttatgggcaatgagataaataacaacattaaaaccaagaacattgccttactatattttccaaatattttgtttaaaatgaaaactaatcaaatacttgatttgataattatatgtatataaattctaatatcttccaagatacgtgggcttaattttagttttgactttgtgaaaaacttcaaaaatcctgtaataatctgccctctactctaaattatttcagtgcctgaaatcaagccagcaatacctctccctgcacctgaaccgaaaccaaagcccgaagcaggtgagcaagcttatcctcaatgtcaacagcatattctttctgtattcacacacataacatgtacttaataaaagatagtaggtgaaagtcagtatgtatcaaatgatttctaacgtctcaaaatgcttaatatactattctcttaaaaactagttatttgaagatttcaaaattatatcagaagaggcaaataagctaccaaataagtttttaggaagtgacaaattgatacactaatgcaatggacttctctctacagaagtgaaaacaatcaaaccacctcctgtggaacctgaaccaacccccatcgctgccccagtaacagtgccagtggttggaaagaaagcaggtatttatcctgtagctttctttttgctagtttgttttggtgacttaataaaagtattcacacttgattaaaattcaagccctgtttatgctgcaacataggtatcatttcaacttcggaggtttatggtaagtttctaccttttcttcatgtgatatcctttatccaccttgtctcttgcccagtgggtgaatattgtgccttaactggaatgtacgttcctgggttgcaccatttctttcatatgctttggagattaagtaatgaatatgtttggggctgataaaaactaaggagacaggcagagaccctgtaagggtatacatataagaatcccatgaagcttcaaatttcccttataccctattggaacaatttctcttttttaaaaaagtgtgtatattgggataatgtaaaagttctggaaatggatagtgttgatggttgtacaatattgtgaatgtatttcatgcaactgaattgaatacttaaaaatggctaaaatggtaaattttatgttaggtatattttaccacaataagaaagaaaaagaaaaaagagactccatatttcagtcttttaatctgtataaggaattagatcaataataattttcttaaatgttctaacttaatgatataggtatctcaagtccaaacttaaagcacctattaattgtatatgaactatttagtatagttcatcatttaagtgataatttgagatataattgatcaaaactgatttgatgtgtaattgatagtcattgataaacatacacatcctgactatttgccctttggctcactatctgggtgatgagatcactcatatcccagacctcagcatcatgaaatatatccacataacaaaactgcacatgcatcccatgagtttaaaataaaagttgaaattatttttttaaaaaagaaacaacaaaaccaaaaataaaacaaagtaaatttaaagcgggggcggtggtggtggggtggggagaaggcatgtattgataattttctaagatgtgaagaatctaagatattcaatataatgccttgacaatttgttcctatggaaaaatgatcatctccactgataaagcacaaaataaaaaattcagggtgaatttaaaaaaaaaaaaagagaactatttgttacattccacagtgagatgtgcataggccccgggaataacatttagaaatgtccataatagtttgacagagaaattttttaatttaattttctgaacctaataataaaaattggcttatatctttaataaatcaataaataaaactatttggaaaaattatattattttagattattaattcaataattagtcattttatatttgtttatatatttttatataaattatttagaaatttttttatttaaaattatctcaaaatatttggacattaccatgtttaatgacataaaaaaatacactatattcttttgactgtagtttaatttttaatatttgtgttatattttgttgctgatgtttatgatttgggcatattcttttaaacttttataatgtcaacgtagtacttttattattcagaaaaaggtgatgaactgctcttgtctaattaagtatgtataaaaataaagctattctcagttatcctgggggctgaagctagagaactcattccacagtttatactgtccctgtattaataatggaatcaaactctaaatgtcagaactctcttgcttctgccttacttcattgtctaaaggaaatcttcaaagaaactcatgcatgtgtggtacatggactctttttccttagtcttccctggatttgtttgtctgcccaatttagacataaaaagaaaggcttttggtaacctctcagccatttcccttttccctacactgatttattgacaaaaccttatttccttggttcacataatcaggacttacataaacatataaaatattttgcacagctaggcaggagcaaaacttttcctcacaaggcaacagtaagccttccaaaaatgggaagataataaggcacttgctgaaagaagttgttaatcctaaatatgttggcagtttagcttgagctcttcagtctcagaatatgccttcctggaaatgtgattatccatagaagtcatataaatgaaaccaatttctctttatgcgttaatatttataatggagcatgactcaccctccatggtttactattaaacatgaaataagtccgaaaagtgtttaaatgctgagttttatttttatttcagaagccaaagcacctaaggaagaggctgccaagccaaaaggtcctatcaaaggtgaaattcatttttctagtacttgcattgtaaccttccactctgaatttccaaagttcatattcaaggggaaaaaaatttcaaaattcataacaatttttattttttctaattgattctactaaaactagcatgttttctgatatttcaaataatacttttagtattatgcaaggagatatatatatatatatatatatatatatatatatatatatatatccaactatattttagcatagtgaatcccataagttcttagcttcatttttcatatgcatggtatttatacatggcagataaaataattagacattaatctggctattttatacttcagattaaaacttgagaaaagggacatttattattcatggattccttataccatctcattttcctgcctgaaacaaggcagtataaactcaattggcctttcaattgcctggtctttagttttctcgtcttctaattgctttacggctggttttatccagcaggcagccaagtatgaactttctgactcctaaggagatgccaaatcaactttttattttactttgaattaggtgtacccaaaaagactccttcaccaatagaagccgaaaggagaaagttaaggccaggaagtggtggagagaaacctcctgatgaagccccgttcacctaccagctaaaggctgtgccactgaagtttgtgaaagaaatcaaagacatcatcttgacagaatcagagttcgttggctcttcagcaatctttgaatgtttggtctccccttccactgcaattacaacctggatgaaagacggtagcaatatccgtgagagtcccaagcacaggtttattgcagatggtaaagacagaaagctgcacatcattgatgttcaactttccgatgctggtgaatacacctgtgttttacgtttgggaaacaaagaaaagacctccacggctaaacttgttgtagaaggtaatttctagtcttctgaacataatctatattaaactttaatgtaacaaaccttagtagcaacttgcattgtagttttacaaaacctcttatttccaagttttatttcattgaaaatattgtatttattgaaatatatactgaaattctccatagaacttcctgtgcgttttgtaaaaacactggaagaggaagtcacagtggtcaaaggacagccattgtacttgagctgcgagttaaacaaagagcgtgacgtggtctggaggaaggatggcaagattgtggtggagaaacctggccgaattgtgccaggcgtcattggcttgatgcgggctctgaccatcaacgatgcagatgacacagatgctggaacatacacagttactgtggaaaacgccaacaacctggagtgttcatcttgcgtaaaagtagtaggttagtactttcctgggagatttcgttctgcttattgttacactaagaaaatggaagaaaggacctcgtttcccagtattacaatatcagaaatcttgtacctaagaggggaataacaatatatcctacagtggattaattatgcccagtattgtgaaatttttcctattcctgaaatttactaaggaagctatgtatattacttgttcagaccttaatcattttttctgatcttattttcatatagaagtcattagagattggctggtgaaacctatacgagaccagcatgtgaaacccaaggggacagctatttttgcctgtgatatagcaaaagatactccaaacattaagtggttcaaaggatatgatgaaatccctgcggaaccaaatgataagactgaaatactgagagatggaaatcatctgtacctcaaaattaagaatgctatgccagaagatattgctgagtatgcagtggaaattgaaggaaaaagataccctgcaaagctgacacttggaggtataaaatcttaccttttattcaaattataagttttgcgtatgtgtaaagccaaataacacaccaaaacacataaaagcaaagcatcgttgggttgtctaaagcattatgttacttcatccctgaccaatacagagcgtgaagttgaactgcttaaaccaatagaggacgttaccatttatgagaaagaaagtgcaagctttgatgcagaaatctcagaggcagacattcctggacaatggaaactgaaaggagaacttctaaggccctcacctgtgagtaatttcacattttaaattgttagtcatataaaataaccacatccaatattcaggatctatatcctagattcgggttgctttaataataatggagttaatggagtcttctaaagtctccaagaaggaaagaaattttacgtatcatttggggacaacttgaacaatttgtgtaaaatgttatgacagggaattctctgcttacttttattagtagtaatttttaaaactctatagaaatttgtatctgaaacacttctcctatagggaatttatctctttcaaatggttactaaaactattgtttttcagacttgtgaaatcaaagcagaaggtggaaaacgcttcttaactttgcacaaagtcaaactggaccaagctggtgaagtcctctaccaggcccttaatgcaattacaactgccattttgacagtaaaaggtatggggcttttagaatttggggaggggtctcaactttatttcacttccctgtgcattctgaaaagcctcattcttaatgtctgattttcagaaatcgaacttgactttgctgtgcccctgaaggatgtcactgttccagaaaggcgacaggctcgattcgaatgtgtcctcacccgagaggcaaatgttatatggtccaaaggacctgatataattaagtcatctgacaaatttgatatcatcgctgatggaaagaaacatattcttgttattaatgattctcaatttgatgatgaaggggtctatactgctgaggtggagggcaagaagacctcagctcggttgtttgtcacaggtaagcgagctaatgagatctgtgacatcccataaaggcatgcaaatatatgactttaaagataggacgccaagttctaaaagctgtgataatgcatcactaattaactttcacagtgttaccaaaacaaccccccttaatttgtttttagtggagctctatttggaaagatgaataaataagtgccatgtgaaatgggtcccttttactcaggcagattagaatggaatctttctgaaggtgaattgtgtttctgaggcattatctatgcttgcatttcaggtataagactgaaattcatgtcacctcttgaagatcaaacagtaaaagaaggtgaaacagcaacttttgtttgtgaactttctcatgaaaaaatgcatgtagtctggttcaaaaatgatgccaaactccatacaagcagaacagtactcatctcttctgagggcaagactcacaaattggaaatgaaagaagtgacattggatgatatatctcagataaaagctcaagtcaaggagctgagctccacagcacagctgaaggtcttaggtaaatgtaaccaagtataaccagatagccagtttctgaatcatgggagtggggagtaataaaatattttgcaaccttttactctttaataaactttaattttcacattcttctaattttatgctaaatgtcttttacagaggccgatccctacttcactgtgaaattacatgacaaaactgcagtggagaaggatgagattactttgaagtgtgaagtgagcaaagatgtaccagtgaaatggttcaaagatggtgaagagattgtcccttcacccaaatattctatcaaggcagatggcctgcgccgcatcttaaaaatcaaaaaggcggaccttaaagataaaggcgaatatgtgtgtgactgtggcacagacaagaccaaggcaaatgttactgttgagggtgagttgctcaacaatgtaaaatttaccctatctgaatctgcagtttattagttcagtcatgctaacaaaactgtatcatttcagctcgactaataaaagtggaaaagcctctgtacggagtagaggtgtttgttggtgaaacagcccactttgaaattgaactttctgaacctgatgttcacggccagtggaagctgaaaggacagcctttgacagcttcccctgtaagtcaagattagctaattatataggagaggggttgcttggttgtgtagggtgaaaaaaggcataaaatatcttgatgatttgtaggaataactatataaatgatgttctttctttccttctaaccctcactccaaacaggactgtgaaatcattgaggatggaaagaagcatattctgatccttcataactgtcagctgggtatgacaggagaggtttccttccaggctgctaatgccaaatctgcagccaatctgaaagtgaaaggtatgctctacttgtcagccacgtttttgtattttctctgcaagacttcctgatacacccctgcattgatcaagggtcatcaatggaaacgtattctgacttcatccactgtccacttctttcagaattgcctcttatcttcatcacacctctcagtgatgttaaagtcttcgagaaagatgaggctaagtttgagtgtgaagtatccagggagcccaaaacattccgttggctaaaaggaacccaggaaatcacaggtgatgacagatttgagcttataaaggatggcactaagcattcaatggtgatcaagtcagctgcttttgaagatgaagcaaaatacatgtttgaagctgaagataagcacacaagtggcaaactgatcattgaaggtaaatagttttatcaaatagtccaccccaaaatcattttttttgcctttagttttatatttcttctttaaagtgcttcaattaataagttctttcttttttttcttgataggaatccggctcaaattcctcacccctctcaaagatgtaactgccaaagagaaggaaagtgctgtatttactgtggagttatctcatgataacatccgagttaaatggttcaagaatgaccagcgcctacacaccaccaggtcggtctcaatgcaagacgaagggaaaactcattcgatcacattcaaagacctgtctattgatgacacctcccaaattagagtagaagctatggggatgagttcagaagctaaactcactgtgcttggtaagtgctttttaaattttaattttactgcattaaattcaacagaaatttgtggagtatctattctataaaatagtcttctaagtgttatattgcatgaaagcagcccaactccttaagaagctatcacatatgtaatcaggcttatttctaaaacactttaccttcattactataagttaatgaagattctagcttacacccacaaaatagccaattaaaagccaacttaaaattcttcattaattattgagccctgtcatgtttaaaataggagtatataaatactttctatctcttcattttatcaaaattatttcagaggaatgtttttcaagtttcccataagagaagatattacataatttacattaataagcctcattgtttttcttggccacctaatatcaacaagattaaacatgaaggctaacatatatagacatgattaaaggcaaactattaattgattaagaaaaactaacaatgtgaacctgaaagcttaaaagtaaactagacataatagagttgctaagaattagaaatttacccaaataatggaggaacacaaaattgtatttgaagctaaatttcagtctttttagctactgttaataaaatgtttcaaaattcaatatgaatggattagatcttgataaatcccacacactgattcccttcctaatatttagagaacttttgaacataaacaggttaaatgattgaacacttgacacaattttaaaagatactcagaactctgtgagttgtgtcttaaactttccaagagattgtcatttccctaaggtgattaataaaagcttttcacttatactttacttgcagagggagacccatattttacaggaaaacttcaagattatactggtgtagagaaagatgaagttattctacagtgtgaaattagcaaagcagatgcaccagtgaaatggtttaaggatgggaaggaaataaagccatccaaaaatgctgttattaaggcagatggcaagaaacgcatgctaatcctaaagaaagccttgaaatcagatattggacagtacacctgtgactgtgggacagataagacctcaggaaaacttgacattgagggtaaggaaatttccatgagtttcactcttgaagcattggggttatttgtgccagaggctaatgacccatgctggcccttcacttttctagatcgggaaattaaactggtgcgacccctgcacagtgtggaggtgatggagactgagacagcacgctttgaaaccgaaatctctgaagatgatatccacgccaactggaaactcaagggagaggccctactccaaacacctgtaaggctatttctgaacttgtcaacacctaaaggagctgtgtgaattagaaaagaacaggtgaaagtcagagtggatgcaggacatttaaaacatgatagcagtttctctatcagaccctaagccaaagagagatgtcagggtctatgaatgggctcagactggcacacttgcattacttttgatccagcagagtgagtataaggttgtagatactctgtgatgctgctagttggctcagaattatacagctaaaataaatgtggctttcctcttagtacttgtaagctttacttcctaaaaaaagagctcaaagttatataaagtttcatcaccatttatttgttgcattcctttaattaagataatctatccttagaacaaaatttcaaagaaaattattttctatgaaagtttttctgttttgttggtacaggattgtgaaattaaggaagaaggcaaaatacactcccttgttttgcacaactgtcgcctggaccagacgggtggggtggatttccaagctgccaatgttaaatctagtgcccacctccgagttaagcgtaagtattgtatatttttcagggaaattaaataaacactttttcagaaaatgaatgtgagtgaaattaattggacctattttattagttagaaaatattattaaaacacaaaaactggctctcttgtatttgccactttgacattccaatacagaagtggttcaaatcgtaaagttttggaaattttgttgaccttgccatttgaacaaaagaaaatttagcaaatcagattttcctgctctgtagtcctctcattgaaagtagatacacatacaatgagaatctaactcagaacccttaaagaccacttccctcaagtggctgtgcaactagagcaccagaaagacaagctttgctgtgtgggcattttagattcaagaaagaaggtgggaagcattaggctaacgtttctggaaggtgcaaagtgtttgatggatagggacagcctctgattgagggccccttgtcctctcccaatcagagtcttagttattttggaagtcacataccttatgtagcaagaagaacttgacgcctggcagagagacagatgcagcacagatttctcgctgaccttgtacgtcagaacgaaagggcccctacatatactcgctctctggctaccagctctccccttctcagcgccgtggggccacgttcacgtgggagttaaaatagtggccagtcctgtggcttcttgaagaaagcaaccatgaagattcatatctaagtctctatttattcttttgggattacaaaatgagtaacgcaaagctgtttcttccctctcgaaaagcacgagtaattggtcttctgaggcctttaaaggatgtcaccgtgactgcaggggaaacagccaccttcgactgcgagctctcctacgaagatatcccagtggaatggtatctcaaagggaagaaactagagcccagcgataaggtaaaaagcaggcatgccttgtctttcccgttctttttctggagttcttccaccttcacttgtatgttccttattctttgctctttctaatgtctcttcctctgtctttgcctttctctttccgcctttagcctgatttctgctgaaactgtaaagccaattttttgcattttttcttaggtttaacctgatgatttttttattgaaattgaaataaatttaaagtatgatcatgttttagttttttgaagaaaagacaagactcattgactatgaatgatagtttgattaaccagaaggcaggaaggatcaaaaaggctttctgattgcacgctctgcagccatggtgcacattaagttttaagactaacgctctccatcctatttagtgttctgcatataaggggattaagaggagaagactgaaattccatttcgggcagttgatcaagtagttgagataacttctgggcagatttgctcttcaagcatttctccaaagctatttttaaccttcaagtgctctgggctgtgcgatatctggaatgcaagtggactatttaaagtgcaactgatggtactgacaagaaagaagggctctgtggttatccacatatgtggatgaaatattttttttaagctttggtaaataactagctcctgcttttagcttttactaacattctttatgcccaagattttacccataagtaaaaactaagggattattcagataggcccacaatacaatttgcctaaattgatctatatgttttgtccccagaaacaacatatgtctttaaattatcttgacaatccatcattaattttgaattcttaaaataaaatatatggaatatgtccagcctgggttggaaataaagcacaggacagtacattgttctgtgacatattcccccaatatttcagaaatactattaaatgtgctataaagatctcaacaaaaatcaaactttgaagacttaaaggaatataattaaaaagtgattcagtttaacaaaaagccacagcattgactgaagtatttgaaagcaatgccttcaagtaactgctttgaaacaaacaaacaaacaacaacaacaacaacaaaactagtattccactaaagtgattacagggtaattcaccagcagtcatctgataggtaacgcctgcctgttatacagataataagatcttcttggtctccttttccagtgaccagaaaaagcagcagtacattccatttgtagcatgggaattaagttacatatcacaaaaccttccttacaatgaggtcttctaaatattgaactgagggaggcacctctaccttcaagcttattgtttgaaaaaatatattttgcctatcatgcatgatttaattaacttcatgtctaaaggcagagaattggttgctttttcaagattctttctagatctgcaaattcatgatttatatataggaacactgcttaaagacaaatgatattattttttcattaccaaatatctttttgtcatagtaagagcttcttattaaaagatcagtctcagttctaatacaaaaactgcactattttaattcaaatgtagactcctaaaaatcttattcacattttatttttaaaaaattctcattgtaactaaaattttttctagggttagaaaggatcagtttactataattctatagggcccctttacatctcttttggcataggaattttaatcctttactctaggcacccgaaataccttagccttttgtgaacttgctcttgcattacttaaatgtctcttttcaaaaagaacttaaatataaactttgaagtaataaaatcattttgttacatgtggcagattttgtttaaattaagtctgtcagaacaaacttgctcttgtcaatgtaattccgaactttaatactcattttatgtaaaaattttcgccttcaaaactacaataaccaaacaagcaaaaacaagctgtaggaataggaaatatgaagagaaacttgtagacatgagttgtttgcattttttctttgttgttgtagttgtttttggctgtcagtttaagaaaggactgccaagttccaaatggcatttgataattttaaagttaaattttaaatttgataaaattaaagtttaaatacaaaactttaatagttttgtcatggtcataagcctaccgtattatattaatatgcttccactataaataaatatttttaaaatctctaacattattcttacaatctactgcaaaatcttcaacattcatttcattggtttatttttataaggcacctaccagttttccttttttttcttttaacatagtggaggtagattgtatacaagctgtttattgagacatactgcattctgagcagtgtcctagagtagctacagaggaactcagatgataaagcaacataatattaatagataaaatatatctgtgggtgggttagaaactgagacaccttttcaaatagccaaaagttgcatgccaaaatttatactgaaatgttattaaaaaaacaaatttttcccatttcagcaccatgccctcggataagtagctctgttccaagggcatatttaactaccccctcctagctgttatttttccttattatgttttttggccactctcaattattaagataattatgtgactaaccatgcccagttcttaattaaagaaaacacttttagatgaaaccttatttctgattcttttctttacactagcataacaaatagttccactggtgaaaaactttacattatttttaacgctaagtaaactcttaagcagtgcaaaatcagtctggatgacagggcacagcttcttaggaattttatatcatagaactggaagaacccccaagtctcttatctttgctgtcagaatgacccctatctgtcgcaccattgacatctgattttcccattcctgatgcttagacacatgaaaaaggaagaagagtccaactttcatttgcagttttgaacaaaattaataggttgtacaaattatttaatcacaggtttaattggtttgcaaaataagtttaattgctaaaataaatgggaagaagagttatagcttgttgttgcatggcaaacaccttacatacagaacataaggtttacttttagcttgccatagctgatattttctttcatcctttcatgaattcgcttttctaagttcttcctttatatgtatataagcccaggggcagaatgggggcacacatatatatacacatatacgtatatactatatgtgctgtatatctacgcatatgcaaaaaagaccacaaatgtaaacagaaactggcctgggcaatttcaatgtgaaaggccacctagtaattatataaaggtaactatgaaaccctaaaattttcttgaaagatcccaaactgcatagtattccatggtgtatatgtgccacattttcttaatccggtctatcattgttggacatttgggttggttccaagtctttgctattgtgaataatgccacaataaacatacgtgtgcatgtgtctttacagcagcatgatttatagtccttatacccaatgctagatgatgagttagtgggtgcagggcaccagcatggcacatgtatacatatgtaactaacctgcacattgtgcacatgtaccctaaaacttaaagtataataataataaataaatttaaaaaaaagatcccaaactattggttgaaatgatttttgaatgcatacgtgctaaatagatgattataaaacaacttggaaagctctatttccatttatttttatctaaatgaattaaatgcacccatatactagattgctgtttcatgtattctttttttaaaaacaactaggtggtcccacgttcagaaggaaaagttcatacacttactctgagggatgtaaagttagaagatgctggggaagtccaactaacagcaaaagatttcaaaactcacgccaacctctttgtgaaaggtaattacaaggcttattttaaaaacatgtataaggcagaggctcatgaacaatgccaactctcaattatctttatatgatgagtactatagatgtttaaaatcaaccaaataatcaaaagtctgattttactttttagcataacaaaataattcacagactatctttttaaagagccaaaattgactagcataggttttacttcctccttccatctctattgtttttattgcacatcctagattttcaaaagccagctggaggaagaattattatcaagctaggtatccatcactttattaaccaagagttggctgttatttccttaatgtttcctagtttttaaaaatgattttcctcttgtctgtacaaataatgataaaatatcatttttagaggaaaatgtctgagtgtaatcaaaacttgaaaataaaacttaggacagaacaaagccctggagatggcaggggaaagttgagaaggtaccaaaactcttggagaaggaaaggagtaccttggctaatgagtatgattctttcagaacccccagttgaattcactaagcctcttgaggaccagacggtcgaagagggagccactgcagtgctggagtgtgaagtctccagagaaaatgctaaggtgaaatggttcaaaaatgggacagaaatcctcaaaagcaagaagtatgaaattgttgctgatggcagggtcagaaaacttgttatacatgactgtaccccagaggatattaaaacatacacttgtgatgctaaggattttaagacttcctgtaacctgaatgtcgtgcgtaagtattcttcttacaaaggacttttcatttgcaattctttaataactacaacaacaaaacaacacaacactttttgcatgcccttcttggcctaactgcatttcttggcaacttctagtattgacactgacctaacctgatcctttatgtgtttaaagaaaaaaagaaaagaaaagtcttattctatgtctggtctgattaatgatggagcaatcacttttccctatgcttcttttctctcactgagtagtgagtagatgtgctctttgtctacatggggtcagcctactgtatggatatcctgatatggatgaggagaaactgaattttaaagataagtagggagtcctaattttaaaaacaaagtaaaagtgatttccatgtggaaggaaaatgaattttcaggtgtggggaacaactagaaaatgagcatgaaatttcagtctgaataggagcatactagagatctgctgtaatatgacaaagcacattcacatgattcaatctctgagaataagaatggataagaagatggagtgaggccctggatcttttgagtcctggactctttgaatgaagagaactctaatggtttttaacattacttcttcctctggtgaaaaatgtaatgtcttttttcaaaatgccacatactagcttatttgtttcattcattcctttgtccagtgatgacatttttctgcaaattttttgtgcaatatttgtttgtttggtttggttgcttcccatctgtcaacagctacaacctagtgactctgtgcttcatgcatcttgtaccatgtttttcttaccactttgtggttgctctgctcaagcttatgtcaaagtagcttcttgggtctccttcttcaccttgacatctaccttcactccaagaaggctcagctgcaaggagcatattttcaaacctattagacagcatttgtctcagaatcttattgctcaagaatggtcatcttgggaaggactcacagggagctctgaaagaaggaagggcaagggggcagctccctaatcctatacaccagctgaattaattctacagatgaatgaaataacagatgtaaaatcctaatcaccctcccatacaaaacacattgctttattgcactaatagatgttatgcctgacttatatgtgacgtcttcaaagctgatttttttaaaaagctaaatgtatgtttcaattacagcctcatgcctcttagccatacacaaggctggccatagtgcttcacgtgttctatctttgaattctgctaatttctcaaagattgtgctaagtgccttaaataagacaatgtttctttgccactggtgtctgaagtttcctttgacattatctttcaagtctggtgcagtgcaaatgaagatttttcctccagctattattcaaaagaactgagatggctccctagtatatatactgtacacacacacatgcacactagttgaacatatagaatgccacataattttatgtaaactaaagagatatctaaaaagcaaagcatcatacctgatgggcagcttcaagtgatttcaaagtcagttgtagtctattaagatggaaaatccctaaaaaagagtcactttttcttaatgtatactatggtaatgtcagagtaaatttccagaaacctcattttgaattctgatgacattctcttacagctcctcatgtggaattcttaagaccactcaccgaccttcaagttagagaaaaagaaatggctcgatttgagtgtgaactttcccgagaaaatgctaaggtctgtgactgtatacctgtcatcttgtactgtcaaataactttatatttacttttggtctagccaaaatggaaaaaaaaaagttagtcacaacttctctggtcaccactttacttttaaagataattgtagtataaaatgtattcttgactttaattgctctctttttagtattattaatttactattacttgaaaaacactggactcacaatcaggagatttagatattagtttgaaccatatgaaagtgctgttttcttagatcagaaagtcaaatatcagcaattatatttctttcaactaagtacctcctgttgctattaactaccattggcaagtttcttcaagtctgagccttagtttacacatccaagaagttagtctgcataatgtctaaggctcactatagctctaaacttatatgatcccattgtttttaataactgataatagtatcacagcagctaacttaacagtaattggtaagattgttcttgcttttggggtttgtttatatttgtgtctgccaccttggttcttcttcacactatgaagtcttgttggttgctttcagaaaaactcaggatcatagtttttcttaaggacacctgtgtgaaggaacaacaagaaaactgataatctatttatcttaaatataggttaagtggtttaaagatggtgctgaaattaaaaagggcaaaaaatatgacatcatatccaagggagcagtgcgcattcttgtcatcaacaaatgtctactggatgatgaagctgaatattcctgtgaagtaaggacagcgagaacttctggcatgctgacagttctgggtaagagtaaagtcattctttgtgaagtatatgtgttgggaaaaaataataatttccagcttaactcaatgtggtttttgttttttcaatgcttgcagaagaagaagctgtctttaccaaaaatcttgccaacattgaagttagtgaaacagacactataaaactggtttgtgaagtctccaaacctggcgcagaagtgatttggtataaaggggatgaggagatcattgaaacaggaagatatgaaatactgactgaaggacggaagagaatcctggtcattcagaacgctcaccttgaggatgctggcaactacaactgtcgactcccaagctctcgaaccgatggcaaagtcaaagtacatggtatgaaaactacagtgaataatcttttatttctaacaattcacacttgctagatttaaagtacaaagacatatgtttctaatatcttgtaactttttcttcccagaactggctgctgaatttatctcaaagcctcaaaaccttgaaatacttgaaggagaaaaggctgaatttgtctgctctatatcaaaagaaagctttccagtccagtggaagagggatgataagacacttgaatctggagataaatatgacgttattgctgatggtaaaaagagggtcctagttgtgaaagatgccacattacaagatatgggcacttacgttgtcatggtaggggccgccagagcagcagctcacttgacagtcattggtaagtttgttcttgcttttagggttttttgtttgtttgtttgttttgtatttgtatttaccactttgatcattattcatactataaagtcttgtcggttgctttcagaaaaactcaggatcgtagttcctcttaaggacacccgggtgaaggaacaacaggaagttgtcttcaactgtgaagtcaatactgaaggtgccaaagccaaatggttcagaaatgaagaagctatatttgatagttcaaaatacatcattctccaaaaagacctagtctacaccctcagaattagagatgcacacttagatgaccaagccaactataatgtgtctttgaccaatcacagaggtgaaaatgttaaaagtgcagccaatctaatagtagaaggtaagtaatttatataccactagagattttttcatcagtttctgttataaaaataattaaaatcaacatatttttctcctttacaacagaggaagaccttaggattgttgagcctcttaaagatattgaaacaatggagaagaaatctgtcacattctggtgcaaggtgaatcgtctcaatgtaacactgaagtggaccaaaaatggtgaagaagtgccttttgacaaccgtgtctcatacagagttgataagtacaagcacatgttaaccattaaagactgtggcttcccagatgaaggtgaatacattgtcactgctggacaagataaatctgttgctgagcttctcatcatagaagccccgacagaatttgtggaacacttggaagatcagacagtcactgagttcgatgacgctgtcttctcctgccagctctccagagagaaagccaatgtaaaatggtacagaaatgggagagaaatcaaagaaggcaaaaagtaagcaagatctttttattctctatttctgtagctatatatacacttttgacaatttagtggccatcattgcaagctaactgataatccaatgtctcctttagatacaaatttgaaaaagatggaagtatacacagactcattataaaagattgcaggctggatgatgagtgtgaatatgcttgcggggtagaagacaggaagtctcgtgctagactttttgtggaaggtacatattaagtgaaaaaacaattctaatgttaccaattttttaaaattgttaatcaaaatgtaaacatatttgtatttatttcacattttctttccagaaattcctgttgagatcatcaggcctccacaagatattcttgaagcccctggtgctgatgttgtctttttagcagaactcaataaagataaggtggaagtccaatggctaagaaataacatggttgttgtccagggtgataaacaccagatgatgagtgaaggaaagatacatcgactacagatttgtgatattaagccccgtgaccagggtgaatacagatttattgccaaagacaaagaagccagagctaagcttgaactggcaggtcagtccctttattttaaaatatccttccaatatcacagagtttagatttcagatttcacagttatttaatgaggtaatccttgtgagggtctttcatttctagcaagccctacccacatgttaacaactctaattttgctcactacaaagtaagtgtcttgagtaagaggaaattaatagcaataatctttacatgccagagccttggacagttgctagtacatgatgactatttatgaacttaggctacaactaagctatcaccctgagagtcttggcaaatctaaagacggtcttatactctcctactttacaaacccctgtgtgccttttaggtatgttctcatcctgacccaggacatccttatacactgtccttatgaaaaagccattagtgtacctctcattcataagaaaaaagtttctctgatttattgaactaagtatgcagtgcctactctatcaaaaaacaaaacaaaacatgttttgcactacactgagtcctatgttactatttttggcaaggaatgcatgtcttatgattttatgccattctcaatcctctactctccaatctaatttgcacgcacaacaacaacaaaaagctatgagaactctaagccacttagttttctctgctataaagttactgtagcttacttccaaggttatgtaaccaatattttctaataaatgcataataacatgatgtagcttggctacgtttaatagtcgaaagcgttcacatgttatctttctcactagctgcaccaaaaatcaagacagctgaccaagaccttgtggttgatgttggcaagcctctgacaatggtggtgccatatgatgcctaccccaaagcagaagctgaatggtttaaagaaaatgaacctttatctacaaaaaccattgatactacggctgaacaaacttctttcagaattttagaagccaagaaaggagacaaagggaggtataaaattgtgcttcagaacaaacatggaaaagcagaaggattcatcaatttaaaagttattggtaagcccttgggtctctcagacttaattggcaaagcacaatttaaaagcaagacagcacactaaaaaaattcctctatatgtgaatttcagatgttcctgggccagtacgtaacttagaagtgacagaaacatttgatggtgaagtgagccttgcttgggaagaacctttaactgatggtggaagcaaaatcataggttacgttgttgaaagacgtgacattaagagaaagacctgggttctggccacagaccgtgcagagagttgtgagtttactgtcactggtctacagaaaggaggagttgagtacctattccgtgtgagtgcaagaaacagagttggcactggtgagccagtagaaactgacaatcctgtagaagcaaggagtaaatatggtaagaagttttaagtaaattcaagttagcttttaagtaaattgcagtctttgccttcatcatcgttaccccaaactcatattttcttcttctgtggtgaaatccagatgttccaggccctcctttgaatgtaaccatcactgatgtgaatcgatttggtgtctcactgacatgggaaccaccagagtatgatggaggtgctgagatcacaaactacgtcattgaattaagagacaagacttctatcaggtgggatactgccatgactgtgagagctgaagacctgtctgcaactgttactgatgtggtagaaggacaggagtacagtttccgagtgagagcccaaaatcgaattggagttggaaaaccaagtgcagccacacccttcgtcaaagttgctgatccaattggtaagcccatcaaaaaagggaaataattactgcatgaaatccagatattaggcctatcaattaaaataaatcaagttaaatgaaagttaataaaaaggtagaatatcataaaaatttggataaagttttagaaacccagactgtgcctactttacttagtgaatttgataaacctgttaatgaggatgatataattgattacaacactgttttcataaattgtcactaacgtaaatggtatgctccaactccttcttttattccagagagaccaagtcctcctgtaaacctaacttcctcagatcagactcagtcatcagttcagctcaaatgggaacctcctctgaaagatggaggaagcccaatattaggctatataattgagcgatgcgaagaaggaaaagataattggattcgttgcaatatgaaacttgtccctgaactgacttacaaggtaggtcatttgcatataaaaaagaatattcaatgtggatcatggacataactgtatgtgttttttacaaatattaattcataatcgtaggttaccggattggaaaaaggaaataaatatttatatagagtatctgcagaaaataaagctggtgtttcagatccatctgaaattcttggtcctctcaccgctgacgatgcatttggtaaatagatattttatttttagatcggggaatagcacatagctactttggggcaacagggacttaaatatggcactgcaaactcattaacttttcttctttgtagttgaaccaacaatggatttaagtgcatttaaagatggtctggaagttattgtcccaaatcctatcacgatcctggttccaagtacaggctatccaaggccaactgcaacctggtgttttggagataaagtactagaaacaggggaccgggtgaaaatgaagaccttgtctgcctatgccgaacttgtcatttctccaagtgaacgttcagacaagggcatttatacactgaaattagaaaaccgtgtgaaaacaatttctggggaaattgatgtcaatgtaattggtaaggaacaaaacatttatcatctaaggtgatttggcagtattaacaaatattagttcagactattaacagtgactcgtgagtgcattttttttcagctcgcccaagtgcacccaaagaattgaaatttggtgatataaccaaggactcagtacatttgacttgggaaccacctgatgatgatggaggaagtccgttaactggatacgttgttgaaaaacgagaagtcagccggaaaacatggactaaagtgagttttgagcagcactgcatcaatgccaaaaatgagagtaggggaaatcccagaaggttgggatgccatacaaaagtcttatgtgctacaacttcttacctttacctcactgaaaatgtacaaaaactttttaagaatgcatcggtgctaatgcttcctgaggtagctcaaccaaggattgtataattgtaattgtcttgtcttgtgagccttaccaaatttgtaataaaaaaaaaaattccctactgacttggtacctgctaagtacccaatatgtacccattaagctagaagtggaaagtaaatatttatttccctggtggtcacacttcttattccactagaataccttagttgacctaatcagccattatttccttgtgtttatattagttactattctttaccctgaattaaaatcatatttctgataagcaaactggtagaatcaacacctcatttgccatcttttttcatgtgtacaaactatgaagcagtttttcttatattgagtcaaatattatcatgtatcctactttgcaattttccctaatatgaaattaatgtaagaataatccctagcattcaaaacaactgcagtttgtatccctggtcatggtaaaaatcttttgggttggcgaaagggttttttggaaataactgattaactgtatttctttgtcccaggttatggactttgtgactgatctagaattcacagttcctgatcttgttcaaggaaaagagtacttatttaaagtttgtgctcgtaacaaatgtggccctggagaacctgcatatgttgatgaacctgtaaatatgtcaactcctgcaagtgagtacattcttgatgatttcttacctaatcttgttgcctgtttttgcttttagacctagagttgaagttatggggcaaggcaggggttggcaatgtgaagagaactgcataggtggcctgtgtaagactgactctctcttccaaatgttgtagcggtacctgacccaccagagaatgttaaatggagagatcgaacagccaatagcatcttcttaacatgggatccacctaaaaatgatggtggttcacgcatcaaaggatatatagttgaaagatgtccacgtggttctgataaatgggttgcctgtggagaacctgttgcagaaacaaagtaggtttttaatttggcatgagagtaaatgtgtactcctagtcactaaaatgggctttgttggggaaaatttaaatgtttgtcttttttcattgagaatcctatgctgccggtgtatctgtctgatttttaaaggtgctgctgaatgtactgcctgctcagggttttcatgacagtattgaaatgaaaatgtattcagttatagtgttgaagtaatccaggtttaatttaaagactagtattataccaggggtttgaatttttgaaagattatgagtactacacaatgaaacgattatcgacatcacagtaaaacatcctattctgttttctgacagaatggaagtgacaggtcttgaggaaggcaaatggtatgcctaccgcgtgaaggccttaaacaggcagggtgctagcaaaccaagcagacccacagaggaaatccaggctgtggacacacaaggtatctatttttgatttttgtcttatcaaataggcctctgaccttaaatctgcttgaacttgataacatcataaataatcttttccaattcagaggccccagaaatcttcctcgatgtgaagctccttgctggtctcactgtaaaagctgggaccaagattgaacttcctgccaccgtaaccggaaaacctgaacctaaaataacttggacaaaggctgatatgattctgaagcaggacaaaagaattaccattgaaaatgtccctaagaaatccacagtgactattgttgatagtaagagaagtgacactggcacatatatcattgaggctgtgaatgtgtgtggccgggccactgctgtggtggaagtgaacgtcttaggtaaggaaggttctcattttaaaaggggataaactctttgcagttactttcttgaaagaaaaaaataaaaaaaatggtgaacaatttttttttctgcatctgtaatgccatacacagataaacccggaccaccagctgcctttgacatcacagatgtaaccaatgagtcatgtcttctaacatggaacccaccacgcgatgatggtggatctaagatcacaaactatgttgtggagagacgagcaactgatagtgaagtgtggcacaagctctcatccaccgtcaaggatacaaacttcaaggccaccaaattaatccccaataaagagtacatcttcagagttgctgcagaaaacatgtatggtgttggtgaaccagttcaggcctctccaataacagccaaatatcagtttggtaagtttctcaatcagctgataaaaaaaaaaggatgcttatgtcaaacttgcattttggtgtcatatttatatacaggacatataacattttacaccattatcctgtctatagatccacctggtcctccaactcgcctagaaccttctgatatcactaaagacgcagtgactctcacatggtgtgagccagatgatgatggtggcagcccaatcacaggatactgggttgaaagactggatcctgatacagataaatgggttagatgcaataagatgccagtaaaggacacaacatacaggtatgctcagaatccccatcaagatgttaagacagcagtatattcaaatgtttactctttagtattccttgggattacagatgattatatattactaaaaaaattttaaactacttttactcatattttctattacctcataatttgaaaaattatataaattccattcaagggcacatttcttagtttactctaaaatattaaccttcaggaagtttcaaagtgtttgatcccccagtatattatgataatgaccactgtcatagatattataattagattggtatgtttggcccagtctaaagtgtgtggcagttaaaaagcaatttttaatttatattgaagtgcttttcagttaaatttccaaatcaccttttcacaatttaaataaattagtctcttctgtgtaaaataaacataggcttcttctgcttcttaccatgatgatacacatgcactttgttcctaattcagagtgaaaggtctcactaataagaaaaaatacagattccgtgtgttggctgaaaatcttgctggacctggaaaaccaagcaaatcaactgaaccaatcttaataaaggatcccataggtattatttatataatttttgtggttatttcgaagttcatatgaactcctttttgacaaacctaaacaatgatttcattggcttgcagatcctccatggccccctggaaaaccaactgtaaaagatgtaggcaaaacatcagtaaggttgaattggacaaaaccagaacatgatggaggtgcaaagattgagtcttatgtcattgaaatgctgaagactggaacagatgagtgggtcagagtggcggaaggggttcccaccactcagcacttgctcccagggctcatggaaggacaggaatactcattccgagttagagctgtgaataaggctggggaaagtgaacccagtgaacccagtgaccctgtgctttgccgggagaagctatgtaagtcactcttgatgtctgggatatataaattcttctaatatctgcctgtgagctacgatatgagaaaatatgaaaaattcattactattatttcctcctggctacattacttcttaatgactgcctgcactttcagactgactattgggtaataaaaaaaaaaatgaatttgttttccttccttctttttcagatcctccatcaccaccacgctggcttgaagttattaatatcacaaaaaatacagcagacctaaaatggacagttcctgagaaagatggagggtcccccatcaccaactacattgtggaaaagagagacgtcaggcgaaaaggctggcaaacagtggataccactgtcaaggacaccaagtgcacagtcaccccactgactgagggctctttatatgtgttccgagttgctgcagaaaatgctataggacaaagcgactacaccgaaattgaggactctgtgctggccaaagacacctttagtatgctcttgcacttaatctttgtgacaataagtgctctcgcacttaatttttgtgacaggagattatcacctttcctctggttttcctaatcattgtttattttattttcagccactcctggaccaccctacgccctggcagtggttgatgtgacaaaacgacatgttgacctaaagtgggagccacctaaaaatgatggtggaagaccaatacagaggtagaatttgaattaattcataaagaataacttacacttggctgcaaattcttaactgtgttttttcattaatgctaatgaaatgctttgttgtttcaatagatatgtcattgagaagaaagaaaggttaggtacccgttgggtgaaagctggaaagactgcaggacctgactgtaacttcagagtaactgatgtcatcgaaggaacagaggtccagtttcaggttcgggctgaaaatgaagctggagttggccacccaagtgaacccacagaaatcctatccattgaagatccaacaagtaagtagtgctgattatacacaagatattgtctagaacttgatgagactgtggatatgaatatttcactcttttctcaggtcctccctcaccaccccttgacctacatgtgactgatgctgggagaaaacacattgccattgcttggaagcctccagagaaaaatggtggaagtcctatcataggataccatgttgaaatgtgtccagtaggcactgagaaatggatgagagttaattctcgcccaataaaggacttgaaattcaaggttgaagaaggtgttgttcctgacaaagaatatgtcctgagagtgagagcagtcaatgctattggtgtcagcgagccatctgaaatctctgaaaatgtggttgccaaagacccagactgtaagagcacaaggtcttttatagttaataaaataccctttattcatgcattgcattttgacatactctgttttttgctcttttgaatgatatcttacaggcaagccaacaattgacctggagactcatgacattattgttattgaaggtgaaaagttaagcattcctgttcccttcagagctgtcccagttccaactgttagttggcataaagatggcaaagaagttaaagcaagtgatagattaacaatgaagaatgatcacatctctgcacaccttgaagttcccaagagtgtccgtgcagatgccggaatttataccattacactggagaataagctcggctcagcaacagcctcaatcaatgtcaaagtcataggtaatcattctttgaagaaaaaccagacattcttcacatgtagaggaaattagttaactttgcagtgctattaataatataattggcttcatgaactggccacttgtaaactaaatgtcacttctgattatgtctttccataggagaagtaaaacaattctaaagagatgaaatcgctaaacgcttattagactaatttatactagttttagttaattgcatgtgaaatactaatttaaataacagatattagcatacccaaagagcattgaaatgaccacaattttttaattgcacagcttcacattttcccatagtgttcttaaccagggatagtaacattttctgcattccccccagccctgcaaataatgtctggaaatttgtggggccatttttgcttggcacacagacttgaggtagataccactgacatttagtagttgggagccaaggatgctaaatgctctgcagtgtgaatgacactccagcacatcaaagattatcctacccaaaatacagatagccccacttagagacaagtgcattattaaaatgctgatttttcaggattactagaataattatccatttttgtaataggcctacctggaccatgcaaagatattaaagcaagtgacattaccaagagttcttgtaagttaacttgggaacctccagaatttgatggtggaaccccaattcttcattatgtcctggagcgcagagaagctgggaggagaacatatataccagtcatgtctggtgagaacaaactgtcatggactgtgaaggatctcataccaaatggtgaatacttcttccgtgttaaagcagtcaacaaggttggtggaggagaatatattgaactgaaaaatccagtcattgctcaagatccaaagcgtaagtttggacatggatgcactatggctaagaactaataaaccatagttttgttttaagaaggtggttttcctgatactaacatttttttcttgttcttcagaaccccctgatccacctgtagatgtagaggttcataatcctacagcggaggcaatgactattacatggaagccacctttgtatgatggagggagcaagataatgggctacatcatagagaagattgctaagggtgaagaaaggtggaagagatgcaatgaacacctggtaccaatcctgacctatacagcaaaaggacttgaagaggggaaagagtaccaattccgtgtgcgagcagagaacgccgcgggtattagtgaaccttctcgggctactcctccaaccaaagctgtagatcccattggtaagttttgtttcatggagttgccactttcccattttgaaataaatgaaaataatgttttgtcagttattttcatcagaattgaaaacatttattggttatgatcactatagatgcccccaaagtcattctgagaacaagcctagaagtgaaacgaggtgatgaaatagcacttgatgcaagtatttctggatcaccttacccaactattacatggataaaggatgaaaatgttattgtaccagaggaaattaagaagcgtgcagcacccttggttaggagaaggaagggtgaagttcaagaagaagaaccatttgtcctgcctctgacacagcgtttgagtattgacaacagcaaaaagggagaatctcagctacgcgtccgagattctctccgacctgaccatggtctgtatatgatcaaagttgaaaatgaccacggtattgcaaaagctccttgtactgtcagtgtgttaggtgagtcattaaaactacactttccaatggaaaaaggttttagtaaaacataaaaataaaaagtttgggagagagttaaaagaaatgggacatagcttcagcaagttatcctcaatcatattttatctgctggccatgtaaaagaaatcacctgatcttgttatttattagctaatggaatacaaagatagatgtgggaaaaccacaaatcatgtcagaggagcatgctcacatttatattttccatagcaacccttcccacacaaatttttgattactgttctcttctgaaatattagatacaccgggaccaccaatcaactttgtatttgaagatatcagaaagacctcagtcctttgtaaatgggaaccaccccttgatgatggtggcagtgaaatcataaactacactttggaaaagaaagacaagacaaaacccgactcagaatggattgttgtcacttcaacacttagacattgcaaatattcagtaacaaaactgattgaaggaaaagagtacctcttccgtgtaagagctgaaaacagatttgggccaggtccaccatgtgtttcaaagccacttgtggctaaagatccatttggtaagtttcctttggcatctaaagtttgcctttttaccatgtactttggtatataattactacagcttttaaaattgcatttttatgtcatactgggaaatttacttcaaatgttatttttttatcaggaccacctgatgcaccagataagcccattgtggaagatgttaccagcaacagtatgctagtgaaatggaatgaaccaaaagataatggaagccccattttgggttactggcttgaaaaacgtgaagttaacagtacacattggtctcgtgtcaacaaaagccttctgaatgccttgaaagccaatgtagatggcttattagaaggactcacctatgtcttcagagtatgtgctgaaaatgcagctggacctggaaagttcagtccaccttcagatcccaaaacagcacatgatccaatctgtaagtagttccttaagaagaaggtggagtagaacaagctattgtacattttaaaaccatcagggagtttgatttgtctatcttcattcattctagctcctcctgggccacctatcccaagagtcactgacacaagctctacaactattgaactagaatgggaacccccagctttcaatggtggtggggaaattgttggctattttgttgataagcagttggttggcacaaatgaatggtcacgctgcacagagaagatgatcaaggtccgtcagtacaccgtcaaagaaatccgagagggtgctgattacaaacttcgggtgagtgctgtcaatgccgcaggggaaggaccgcctggagaaacacaacctgttactgtggctgaaccacaaggtacttaacgttattggaataaaattatggatattttctctatatgggactattttttaatctttcatgggctaatgcatgactgttctctttcaacagagcctccagctgtggaactggatgtttctgtcaagggtggaatacaaataatggctgggaagactcttagaattccagctgtggtgactggtcgccctgtacctacaaaagtatggaccaaagaagaaggggagctggataaagaccgtgttgtaatagacaacgttggaaccaaatctgaactaattatcaaggatgcactgcgaaaagaccatggcagatatgtgattacagctacaaatagctgtggttccaaatttgcagcagccagggtagaagtttttggtaaggaatgttgcactgattttcacaggattttcccaagtgatactatcttattacattgatttttggctttgttttgttttcagatgtccctggtccagttcttgacttaaaacctgttgtaacaaacagaaaaatgtgtctacttaactggtctgatccagaagatgatggaggaagtgaaataacaggctttatcattgaaagaaaagatgccaagatgcatacttggagacaaccaatagagactgagagatctaaatgtgacatcacaggtctgcttgagggacaagaatataagttccgtgttattgccaagaacaagtttggctgtggccctcctgttgaaataggaccaattcttgcagttgatccactaggtaaaagagaaggtttcattgtgtttatagagtaatgttttgcttctagttatattatttactgagctttatggcttcaaactcccaacagtctcaaaatctatagctaaagagtaataagaaaagtaaatcaaaaaactattagcaacattaaagatatcatatttcctataatttcaatgtaatttgtggctgtaagtatattaatcatgcatggtttcttgtactgaaaaacttggatctacaggggcttaataataacctagaagtagtttagacatattatatctctccagtagaacacattggaagtcgggtttttaaaacttactagcgtagtagttaaagagaattcaatgttcttctaaaagattagacaattcctgagaataaatgccttagtcttcctctatattcaaaaagtccccatactggaaggatagagaggcccaaaaccagaaacagcctccaaagaatagaaaaccaaccagagggaatctcccagaaatcaatacgaaacactaaaattgcacacacagtaatgcacactgacatcccatctaagaaagcaaaggctttgaggaagacccattcctcaagagacagaagaacttattccttcaccatcaccccctgaaaaaaaaaaatacatcctatatcactgctgcagctcatctatgaacgtccaatataccacaggctgtgccagaggcaccagaacagagctgagcttccactccttctggttgcaataacagtcaacaagtatggattgggtctagttttaccactgaaagcttaactcttagtttggtccttcaggaaagaaaacttcagcagcattacatacatcctctttccaccatattttgaacccacatgtgaggcaacatgactcaaagtatgttcatagacatatccactatctgttaataaaagaaaaaacactttgctctcagctggtcattcaaagcaaagcttcacagacttactttcctagttcagtagaattagaagcatccccagttacaaaggtaaacaatctaaaatgttaaattaaaaaagcatacgtgcccttgatttatttttcactgataatcttgatgaaaagtttgctaagaaaaattctgtctacatgaatgtctataattttggcaactgacaagttttaggaatgattttaaataaggatgtaaggttatgccaaacagaaggctattttttacataattaagttgaagtgaaatattatttcttacatgaatatttatctcatgctaatcattttcacttgcctctggctaaaggtcctccaacatctccagagaggctcacatacactgaaaggacaaagtccactatcacacttgactggaaagagccccgcagtaatggtggcagtcccatccaaggatatatcattgaaaaacggcgtcatgacaaacctgactttgaaagagttaacaagcgactctgcccaaccacatcttttctggttgaaaatcttgatgaacaccaaatgtatgagttccgtgtcaaagctgtcaatgaaattggtgaaagtgaaccatccctacctcttaatgtagtcatacaagatgatgaaggtgcggaatctgaatataataataattttaatgcattttacagtgtgcctttatcccataagttgaaaaaaacatccttatgactttgttactgtttttctttctcttctctttgcagtgcctccaactattaagttgcgtctgagtgttcgaggagacactatcaaagttaaggcaggagagcctgtccacatccctgcagatgtgacaggccttccaatgcctaagattgaatggtccaaaaatgaaactgtaattgaaaaacccactgatgcacttcagataaccaaggaagaggtatcccgaagtgaggcaaaaactgagcttagcattcccaaagcggtccgggaggacaaaggcacttacacagttactgcttccaatcgccttggctcagtgttccgaaatgttcacgttgaagtatatggtaagtgacttgctttcttacatcaaaaaggcatccagtgtctgtttaagaattgccttctcaatattctctgttgattcctttccagaccgcccatccccaccaagaaatcttgctgttactgacattaaagctgaatcttgctacttgacatgggatgcccctcttgataatggtggcagtgaaatcacccattatgttattgacaaacgtgatgcaagtaggaagaaagcagaatgggaggaagtcaccaacactgctgtagagaaaagatatggggtaaactcttctgaatattttcttatacacattaaaagtacatgactctggtttgatgccattttaatataaccttggaatttgataattaaactcaaaaccacacacgataagctgttattttgttattgtagtgtttagccccacacacataaggctccttagtacatagcgtttgatacacagatactcttttaattgagatccactatcaggtacaatacatctacatatttttattttaaaaaaagctttctccttttctctgtcttcccatgttttgagtctatatatttatttcttcttacagtcatccctcccaaaataagttgaatttttaaatgagtgaaaaccaacataagtatattctcttcaataaatttctgtttttctaatttctagatctggaaacttatccccaatggtcagtatgagttccgagtcagggcagtgaataaatatggaatcagtgatgagtgcaaatcagataaagtagtcattcaagatccttatcgccttcctggacctccaggaaaaccaaaagttttggcacgcaccaaaggatcaatgctagtgagctggactcctcctttggacaatggtggctctccaattactggctactggctggagaaaagagaagagggaagtccttattggtcacgtgttagccgagcaccaataaccaaagtgggattgaaaggcgtggaatttaatgttcctcgtttgcttgaaggcgttaaataccagttcagagccatggcaataaatgctgcaggaattggtcctcccagtgaaccatcagatccagaggttgcaggagatcccatatgtaagtatgcttccgtttctggggactaatttctaaagcacaaagtcactaaatggataattctgccttaaatttcttatatttttctatgccaaattattttatttattaaaataaaaaaggttcatgttcacatagactatcggaagtatatatttatgtgtgtatacatacatgcacagatatatacatacacacatacataaaatcatacagtttgtaaactcttggattaaaccaaatattttatgaggaatcacaataataaagacctggactataaactcctatgtcttctgatactttaaataaatttctatctcattagatactggggaaatcatctctcccactaaacagtcagaccttccagtaggaattcaacaaaaaacagaatgttgttagcttttctataatattattgaacaaagatttaggattctcaggcatagtctgtgaggtcaaataagagagaaaaattcttctaaaagatctgtgagcagattcgttcaaaaattaaaaaatactgtggccataataattcatcctatttgctacatatctgattagattctctatagaagaaaaattcaattatttgttaaaaagaaaattttaaatactcaagtgctatgtggagcatatatacctatataatgaggtagttattcattcatttgcaaactagtattgaacatgtgctttgtgcaaggatctatattaaccactggagggggaaaagttaagattaaaaagacaagtacagtaaaagaatttctgtaattgtaaagcactttcagaaaggtaaaggattgttatgggattattgtagacactgatcctgtccctaaagggcattaagattagtttgtgttcaaaggtttactagctattgatggaatcctttttaaattttcatattgtggcaaattaaatttaaatcatgttttcagtaaaggctattgtagaatttcttcaaagggatctcaaaagtaaagtagttttttaccaatcatgtataaatagaatgtaaatctaacaagataggaagtagtctttctattcccagttagttgtttgctttctctgtttttgcattaatgctaaaggaaaatagaccatttcctttatttctcttctctagaaggcaactgtatttccttttagcatttctattttaatattttaatagattaaaataatatatgatcatgtgtagtaaaagactccagcacttcatcagcttcaaaatctgatgaagcttttttttttcttttgttattagttccaccggggccaccttcttgcccagaagttaaagataaaacgaagtcaagcatctcactaggatggaaacctccagccaaagatggtggcagcccaatcaaaggatacattgtagaaatgcaagaagaaggtactactgactggaaaagagtaaatgaaccagacaaacttataactacctgtgaatgtgtggtgcctaatctgaaagagctcaggaagtacagattcagagtgaaagctgtcaatgaagctggtgaatctgaaccaagtgatacaactggggagatccctgccactgatattcaaggtactagtacttactcagtttatgtattcctcttttgatcttattatgaaattgattaatttactgaagatatttcaattacttttgacaaatatgagctaaatcctgttaaattgtatgtggtattacagaggaaccagaagttttcattgacattggagcacaggactgtctggtttgtaaagctggctcacagattaggattcctgctgtcatcaagggacgcccaacaccaaaatcatcttgggaatttgatggaaaggcaaagaaagcaatgaaggtaggaaaataaccattctcctcttttttccactgaatcactataaggagtatttatactacaactgactgtctccttttctaataggatggagttcatgacatacccgaagatgcacaggtaaaaaaataataattaaaataattcagaatatggttgacttcaatattgctatgatttcattcaatgtatgactactattttctttgtacagctggagactgctgaaaactcctcagtaattattattccggagtgtaaacgatctcatacaggcaaatacagcatcacagccaagaataaagcaggacaaaagactgcaaattgcagagttaaagtcatgggtaagaaagactttgaaagttgctacagaataaaaacaaattatttttaagcatttaaggaacgttgcttatattgtgatttacatccaacagatgtaccaggcccacccaaagatctgaaagtcagtgatatcacaaggggtagttgcagactttcatggaagatgccagacgacgatggaggagacaggatcaaaggctatgttattgagaagaggactattgatggaaaagcctggaccaaagtcaatccagactgtggaagcaccacatttgtagtgcctgatctcctctctgaacagcaatatttcttccgtgtgcgagcagaaaaccgttttggtattggcccacctgtggaaaccattcagaggaccactgccagagatccgatatgtaagctttaaaatctaaatttaaaatatcttctcaaaattgaagtatattattataaacaacgcttaatacttcctttaattatttttacagatcctcctgatcctcctattaaactcaagattggcctcatcacaaagaacacagtgcatctgtcatggaaacccccgaagaatgatgggggctcccctgttacccactatattgttgagtgccttgcatgggaccctactgggacaaagaaagaagcctggaggcagtgcaataagcgtgatgtggaagaactgcaatttactgttgaagacctagtagagggtggggaatatgaattccgagtcaaagctgtcaatgctgcaggagtcagcaagccttcagccactgttggccctgtgactgtcaaagaccagacatgtaagtaccaatgtactgacaaagaatgtcctccttacagctgccttcctaggtgttcaataatagttcacaattaaaagagctatatctgtaccttaggaagctactatggcttgaatgtagacatgggcacattacttaattactcattccttcaatttccacagaattttcacattcccttacctgttaccttttccctgttcaaaggagatgatgtctgtaatttcctcgctgtaattttcctcgcagtctgttttatttatcagaggctaaagcaatttctctgcatgctcctcaaaagggacagaaagtaaccagtcattttcttagcaactgctgagacccatttatcttcacaatcaagtttttatttctctatatgagaaaagatatatccattttaatgaagtatatatatatatatatatatatatatatatggtaataattcttcctctgataattaccatcactactgttgtgtatttgtttattctctcatctaagtgtgaagaaactgtagtcactaccctctttgaatatttctgtcctaaatttgtgcaaaatggaaaattgctttccttttattaacagttatatttcttaaaaggggaattcaccttcttgtgtatcccttcataattctgtgtaaatattaaagagagtatcccatgatactctcctactacaatctcctctcttcccttttgtcaggatatgagaatataataatacacatcattacatgcataatgatgccaaataaagtgaggcaagcacagatacatagccacatgtagatccaataaaagatgctgaccccgtgtacctgctccccaaactagcgtaatagtgttaaagacagaaccattctttatattgggctgagctacaaagtctgcctacagtggatccaaacaactttatagtaactgtgaattctactttctatccctcaatgctttttgctcctaatgacaactttttttaaataatctaggcccaccatcaattgatctaaaagaattcatggaggttgaagaaggaaccaatgttaacattgtggccaaaattaaaggtgtgccattcccgacactaacctggtttaaagctcctccaaagaagcctgataacaaagaacctgttctctatgacacccatgtcaacaaactggtggtagatgatacttgcactttagttattccgcagtctcgcaggagtgacactggcttatataccatcacagctgtaaataatctgggaacagcatcaaaggagatgagactgaatgtcctgggtaaagactgcatggtttggttaaaattacttgtttttctgttcataaataacatttggctttaaaatcatctgagtgataaagggttccttctttaaaccattttaggtcgtcctggccctccagtgggacccataaaatttgaatctgtttcagcagatcaaatgacactatcttggtttccacctaaagatgatggtgggtctaagattacaaactatgtaattgagaaaagagaagctaacaggaagacatgggtccatgtctccagtgaacctaaggagtgcacgtacacgattcccaaattgctagaaggccatgaatatgtattccgaatcatggcccagaataaatatggcattggagaacctcttgacagtgaacctgaaacagcaagaaacctcttctgtaagtaggagaacattttcacatacaaagccatttttactttttttttaaatttcttataatcaatatgatctttttcacagctgtccctggagcaccagataaaccaacagttagcagcgtgactcgtaactccatgactgtcaactgggaagagccagaatatgatggaggctctcctgtgacagggtactggctggaaatgaaagacaccacttcaaagagatggaagagagttaaccgagatcctatcaaagccatgactttgggtgtttcttataaagtgactggtcttattgaaggttccgactatcaattccgggtatatgcaatcaatgctgctggcgtgggtccagcaagtctgccatcagacccagcgactgctagagatccaattggtaagcctggaaaccattccttttttttaaatcttattttccaaaagtgccttggaaaagtcaagaatactaacgtatactggctctttgcagcccctcctggtcctccatttcccaaagtgacagattggactaaatcatctgcagatctggagtggtctcccccactaaaagatggtggatccaaagtaactggatacatcgttgaatataaagaagaaggaaaagaagaatgggaaaaggtaggaaaacttggcactaaggaaatgcactatgaataaactaaaaaatgtcatagttattctcaatcccattaacttctgtctatactttttggattaagaaatcaggaaaatagcataattttaactcacattccaaacatctgttaatgtcagaaatcgaatcaaaagttaagtcatgttattactaatcttttggttataaaccctggaatgtggaataaataaatcaaggtttaatcatttgacaataattttaaagcataactcctgccaagttattccattcagtgttgcctgtaatatctgatccctaaaacctaaaccagcaacaattttcccagagtaaacagttaaataggctgctggtgatgctttaggaagccattaaagcaagaagctacaaagaactattctaattataaaatgtctatgatttctccccagggtaaagataaagaagtgagaggaacaaagcttgttgtgacaggattaaaggaaggagcattctacaaatttagagttagagcagtcaacattgctggcattggagaacctggagaggtcacagatgtcattgaaatgaaggacagacttggtaattatcaatccttccttatgccatcagtatttatgtttcagattgaaggggaaaaatcacatttgtaattttcaattgcttccagtttcacctgaccttcagctagatgccagtgtcagagatagaattgttgtccatgctggaggggtgatccgaatcattgcctatgtgtctggaaagcctcctccaaccgtcacctggaacatgaatgaaagaaccttacctcaagaagccaccattgagaccacagccattagctcatccatggtcatcaagaactgccagaggagccatcaaggcgtctattctcttcttgccaaaaatgaagccggagaaagaaagaagacaattattgttgatgtattaggtaaatactttcaatttgtctgtgcaactttttaaaccaacattcttattatatttacacaaagctatgctgtatgctgtgtaacaaacattttggaaaataagaaaaatcacccataatcatgttgaacattattagaatttttaaaaatttcctccttacttttttattctatgtgtattctgtatggtgggtgtaagtttacaaattatataattgagaaaacagatgctaacaagaagacatgcatccatgtttccagtgaacctaaagagtgcatgtacacaattctcaaattgctagaaggccatgaatatgtattctgaatcatggcccagaataaatatggcttttttatagaacttgcccccatagtgtctattatgttgttatatagttttcatagaagcaactttccttaaactgtacatgaatgtttaacaatctgcaactttccttaaactgtacatgaatgtttaacaatttgccagtgctgaccatttcacatcatgagactctacccctatcgctaaattatcataataatgcaaaaacctgtttgaagggtttcagtattctaattgaagagaagcatcatagttggttatcaatattgcatttctagtcactgaatatagagttgaactctatgaggctttttcatggctctcactggaggctttagtccagtgatttgctcagaacacgaagcctttccactcagggctctttctaagcatgtctctaggcacaacaatactccagccacagtttttatgtgaaaattgccagttctatgttgaatataattaatataagaatggcataaggaaaaatatttcattaagcagtagccccacaaactttcaggttagtttcaagcacctaaagctcttttgcctaatggttattactttaatttgagaactggtacatttccacgttaattatttgcaacctcctcaaagtcattctgaaatttggggcctcctatgctgcttgttgatccactggtcatccagaaataaaccatctctctctccgtttcccctgcagaggaaactggacatagaaactgactatgccactcttacccatctcttgtatccctctgcatgcttgcctcccagctccctcctgtccaactcacaaattgcttttaaaaagcatttttattttcccttcagcctctactaaaaccatggtaaccaataactgttgcaaacctacttcattaacaaatatggggcttgatgctatggctcacacctgtaatcccctgactttgggaggccaaggcaggtggatcacttgaggtcaggagttcgagaccagcctgaccaacatggtgaaaccctgtctctactaaaaatgcaaaaattagcctggtatggtggcacatgcctgtagtcccagctacttgggaggctgaggcaggagaattgcttgaacctgggaagcggaggttgcagtgagctgagattgtgccactgaactccagcctgggtgacagagcgagactcccatctcaaaaaaaaaaaaaaaaaaaaaaagtggttgactgtttttgtattgactagatagcagaaggaaaaactaactcaattagtagacacaaaaccttactttcttcaaaacaacatttttgtctccttttaaaaaaacaagtgttgagcattatctttcattgaaggcaaacagcttgaattattttcttcttatttccagatgttccaggtcccgttggaacaccattcctagctcacaacctaaccaatgagtcctgcaaactgacatggttttctccagaagatgatggaggctctccaatcaccaattatgtcattgaaaagcgtgaatctgaccgcagagcatggaccccagtgacatatacagttacccgacaaaatgctactgtccagggtctcattcaaggaaaagcctactttttccgaattgcggctgaaaatagtattggcatgggtccatttgttgagacatcagaggcacttgttatcagagagccaataagtaagtaaaaaaaaaaaaatgtatacttaatcacttctttactcatttagtacaagactatggtgaaaaaatatgtgtataaatgccgtacatttcattcacttgacaagcagttatcacacaactactcagtatctgatttggtagtatttggacagtgattgtgaaagagattttacaaatatgtataattcattgaatttctttttgtttttttttttctttttggttttgttttgacacatagtcttactgttaccgaggctggagtatagtgtcatgatcttggctcactgcaacctccacctctgaggttcaagtgattcttgtgtctcagtctcccgagtagctgggattacagacatgcaccaccatgcccagctaatttttctatttctagtagaggcagggttttgccatgttggccaggctggtctcaaactcctggcctcaagtgatccacctgcctcggcctccgaaagtgctggcattaccactcctagttcatttatcaaatttcttccatctatacctcacagatttttttttaatttcccacttaatggcattaatagaaactgaattattttcctacttctaaaactaccaattctgaagacctttcctaaattattttgcctcaacaaacctctatttcctcatctgtcaagtgaagaaattcaattgtattgggtcctttttaactctaatagttttatgatgagatctcttttgctatttatgggagcagagagtttaatgtttaaatgcaatcttcagaaaaggaatattcactacatcctactacattcttaatgtgacatttttttctaccacaattcctatacttatattcgcagctgtaccagagcgtcctgaagacctggaagtcaaagaagttactaaaaatactgtaactttgacttggaatcctcctaagtatgatggtgggtcagaaattattaactatgtcctagaaagtcggctcattgggactgagaagttccacaaagttacaaatgacaacttgcttagcagaaaatacactgttaaaggcttaaaagaaggtgatacctatgagtaccgtgtcagtgctgtcaacattgttggacaaggcaaaccatcattttgcaccaaaccaattacttgcaaggatgagctgggtatgtgtctactacaatttatacttctgaaacttgcacatttgtagatttgtaataagacatcaataaaaatgacttgcctttataattacaaattttagcacccccaacgcttcacctcgacttcagagataagctcacgattcgagttggtgaagcttttgccctcactggccgttactcaggcaaaccaaagcctaaggtttcctggttcaaagatgaagctgatgtgctggaagatgatcgcactcatataaagactacaccagcaacacttgctttagagaagatcaaggccaaacgttcagattccggcaaatactgtgtggttgtggagaacagtacaggctctaggaaaggtttctgtcaagttaatgttgttggtaagtcttatttagtggaaagaatagatcttctgttctttcaaaagcagaaatggcaataacattttgtgccatgattttttttttctgcagaccgtcctggaccaccagtaggaccagttagttttgatgaggtgaccaaagattacatggttatctcttggaagcctcctttagatgatggaggcagtaaaatcaccaattatattattgagaagaaggaagtgggtaaagacgtctggatgccagtgacatctgcaagtgctaaaacaacatgcaaagtttctaaactacttgaaggaaaagattatattttccggatacatgctgaaaatctgtatggaataagtgatcctctggtgtctgattcaatgaaagccaaagatcgtttcagtatgcattatgtttctttttagtgattcaatgcttgataaaactaatataaagaaataaatttctaacgcattttccaacatttgttacaggggttcctgatgcacctgatcagccaattgttacagaagttaccaaagactctgcattagtaacctggaataagccacatgatggaggaaaacccatcacaaactacatcctggaaaagagagaaactatgtctaaacgatgggctagagttaccaaagatcctattcatccatacactaaatttagggttcctgatcttctagaaggatgtcagtatgaattccgggtttctgcagaaaatgaaattggtattggagatccaagcccaccatccaaaccagtctttgctaaagatccaattggtatagtattaatggatttattcagttttcatgttatctaactttgttttcagctatatgctaattcgttttttacttttattttttagctaaaccaagtccacctgttaatcctgaagcaatagatacaacatgcaattcagtcgatctaacttggcagccaccacgtcatgatggtgggagcaagattctgggttatattgttgagtaccagaaagttggagatgaagagtggagaagagccaatcacacccctgagtcatgtcctgaaactaaatataaagtcaccggtcttcgggacggtcaaacctataagtttagagtgttagcagtcaatgcagctggtgaatcagatccagctcatgttccggagccagtcctagtaaaagacaggcttggtgagtaaaatgctctcacttgtgtttgcaaggaaaatagatgtctgattgtatgtgtttaattgtaatctgcattatggatcaaatctgagtgttctgttctctttattctagaaccccctgagttgattcttgatgccaacatggcaagagaacaacacattaaagttggtgatactctaagacttagtgccatcatcaaaggagtgccattcccaaaagtaacttggaaaaaagaagacagagatgctccaactaaagcaagaattgatgtgactccagttggtagcaagcttgaaattcgtaatgctgcccatgaagatggtggaatttattctttaacagtggagaatccagctggttcaaaaactgtctcagtaaaagtacttgtattaggtaagaattttactacttaggccattaaaaataaattttgataattttgagctcttatatggataaaattacttatcaaactgttatttaacactttttagataaacctgggccacctagagatctggaagtcagtgaaattaggaaagattcatgttaccttacttggaaagaaccactggatgatggtggttctgttattaccaattatgtggttgagaggagagatgttgccagcgcccagtggtcacctctctcagctacatcaaagaaaaagagtcacttcgctaagcatctgaatgaaggcaaccagtacctcttccgagtagctgcggagaaccagtatggacgtggtccttttgttgaaacaccaaaaccaatcaaggctttggatcctctccgtaagttgctttctctgaatacaaaactattgtttgactgtctttaagaatattactttttcatcataacttcttctttgaaaagatcccccagggccacccaaggacctgcaccatgtagatgttgacaagactgaagtctccctagtctggaataagccggatcgtgatggtggttctccaatcactggatatttggtagaatatcaagaagaaggcacccaggactggattaaatttaagactgtgacaaacttagagtgtgtggttactggactacaacaaggaaagacctatagattccgtgtaaaagctgaaaacattgtgggtcttggtctccctgacacaactatcccgatagaatgtcaagaaaaactaggtaatttttggactagcagtattaccttatttctttttaaaattattcatataggtgaaaatcaaaatctaattttttcatgtttacttttcagtgcctccatccgtggagctagatgtgaaattaattgaaggtcttgtggtaaaggctggaaccacagtcagattccctgctattataagaggtgtgcctgttcctactgcaaagtggacaaccgatgggagtgagattaaaaccgatgagcactacacagttgaaacagacaacttctcatcagtacttaccattaagaactgcttaaggagagacactggggaatatcaaatcacagtttccaatgcagccggtagcaaaacagtagccgtacatcttactgttcttgatgttcctgggccaccaacaggtcctattaatattctggatgttactcctgaacacatgactatctcatggcagccacctaaggatgatggaggaagccctgtgataaattatattgttgagaaacaagatacaaggaaagacacgtggggtgttgtctcttccggaagcagtaagacaaagctgaaaatcccacatctgcagaagggctgtgaatatgttttccgagttagagcagagaataagataggtgttggtcctccccttgactccacacctactgttgctaagcataaatttagtcctccgtctcctcctggtaaaccagtggttactgacattactgaaaatgcagcaacagtgtcttggaccctgccaaaatctgatggtggcagtccaataactggctactatatggaacgtcgagaagtaactggcaaatgggtgagggtcaacaaaacacctatcgctgacctgaagttcagagtgactggactctatgaaggaaatacatatgagtttagagtttttgctgaaaatcttgcaggactaagcaaaccatccccaagttctgatccaataaaagcttgccggcccatcaaaccacctggaccacctattaatcctaaactgaaagacaagagcagagaaacagctgatttggtgtggacaaagcctctcagtgatggtggtagccccattctaggatatgtagtggaatgtcagaaacctggcacagcacaatggaacaggattaataaagatgaactcattaggcaatgtgcctttagggtacctggactaattgaaggaaatgagtacagattccgtataaaggcagctaatattgtaggagagggtgagccaagagaactagcagaatctgtgattgcaaaagatatccttcatcctccagaagtagaacttgatgttacttgtcgtgatgttattaccgtgagagtaggccaaactatccgcattctagctcgagtcaaaggcagacctgaaccagacataacttggactaaggaaggcaaagtattggtccgagaaaagagggtggaccttattcaggatctacctcgtgttgagttacaaattaaagaagctgttagagctgatcatggcaagtatatcatctcagctaagaacagcagtggacatgcccaaggttcagccatcgttaacgtccttgacagacctgggccttgccagaatttgaaggttaccaatgtaaccaaagagaactgtacaatttcttgggaaaacccactagataatggtggctcagaaataacaaacttcatagtagaatatcgcaaaccaaaccagaaaggctggtcaattgttgcatcagatgtcactaaacgattaatcaaggccaaccttttagccaacaatgaatactatttccgagtttgtgcagagaataaagtaggtgttgggccaaccatcgaaacaaaaactcccattctggctattaaccctattgacagaccaggtgagcctgaaaaccttcacattgcagataaaggaaagacatttgtctatctaaagtggcggaggcctgactatgatggtggcagtccaaatctgtcatatcatgttgagagaaggcttaagggctccgatgactgggaaagagtgcataaaggaagcattaaagaaactcactacatggttgacagatgtgttgaaaaccagatttatgagttcagagtgcaaacaaagaatgaaggtggggaaagtgactgggtgaagacagaggaagttgttgtgaaagaagacttacaaaaaccagtacttgatctgaaattaagtggggtcctaactgtcaaagcaggggacaccattaggcttgaggcaggggttagaggcaaaccattcccagaagttgcatggaccaaggacaaagacgctacagacttaacaagatcaccaagggtcaagattgatacccgtgctgattcatctaaattttctcttactaaagcaaagcgaagtgatgggggtaaatatgtagttacggcaactaacacggctggcagttttgtggcctatgccactgtcaatgttttagataagcctggtcctgtgagaaatctgaaaattgttgatgtgtccagtgataggtgtactgtttgctgggatccaccagaagatgatggtggctgtgaaatccaaaattatattctagaaaaatgtgagacaaagcgaatggtttggtctacctattctgctactgtcttgacacctggtactacagtaacacgtctcatagaaggaaatgaatatattttcagagtccgtgcagaaaataaaataggcacagggcctccaacagaaagtaaaccagtcatagccaaaaccaagtatgataaacctggtcgccctgatcccccagaagtcactaaagtaagcaaagaagagatgactgtggtttggaatccacctgaatatgatggtggaaagtctataactggatactttttggagaaaaaggaaaagcattcaacacgatgggtccctgtcaacaagagtgcaatccctgagagacgtatgaaagtacagaatctcctcccagaccatgaatatcagttccgtgtcaaggcagaaaatgaaattggaattggagaaccaagcttgccttcaagaccggtggtggcaaaagaccccataggtaggatgtccttgttttttctgatattacagcaactcttaatctcaagcacagaagtattcgataaataagttaatgtaacatctaaatctgtaacatccaaactgtatttagcaaatatttttccaaatagaccttttaccaaaatacctaaaaggtacaaacaatagtagattctcatttttatgaaggaaaataaagaggacactaattgaaaaattggatgacctatatttgattaactgagaataggctatataaaattacacattgaagtatcactagtagtagttaactatatgtatattttactttcagagccacctggtccaccaaccaatttcagagtggttgatacaaccaaacattccataactcttgggtggggaaaaccagtctatgatggtggtgcaccgatcattggatatgttgtggaaatgagaccaaaaatagcagatgcgtctcctgatgaaggctggaaacggtgtaatgctgcagcacagcttgtacgcaaggaattcactgttaccagcttggatgaaaaccaggaatatgagttcagggtgtgtgcccaaaaccaagttggtattgggcgccctgcagagctaaaggaagctatcaaacctaaagaaatactaggtaagtccttcccttagcatgtgattcattcacacttaatttcttatgatttccccacattctgaaaaatcaattaatgaccttaatgtcatttgcagaacctccggagattgatttggatgccagcatgaggaaactggtcatagtgagagcaggatgccctattcgtctctttgctatagtgagaggacgaccagcccctaaagtcacttggcgaaaagttggcattgataatgtggtcagaaaaggacaagttgatctggttgacactatggccttccttgtcatccccaattctacccgtgatgactcaggaaaatattccttaacacttgtgaacccagcaggagaaaaggctgtattcgtaaatgtcagagtattaggtgggttactaaaatgcttctccctcccacttcaaaaatgaatttgttaatagggatgctgaggagacatgtatatctgattttatgattctttacagacactcctgggcctgtgtctgatttaaaagtttcagatgtcactaaaacatcatgccatgtgtcctgggcccctcctgaaaacgacggtgggagccaagtgacacattatatcgtggagaaacgtgaggcagacagaaagacatggtcgaccgttaccccagaagttaagaaaacaagcttccatgtaaccaatcttgtccctgggaatgagtattacttcagagtaactgctgtcaacgaatatggccctggcgtcccaacagatgtcccaaaaccagtgcttgcatcagatcctctaagtaagtattatgctttcttcctccttttaaccccagtctcctattttagcaaggtcaagatactaataccattttaatccacttctgaaagagatttcatttgtagagaccgaaatagtgtaataaatatctatctcactcatgaaacacttttttgatctgtctcatcttatatgttttgcttttaatgtactgaactacaggttctatgtacattggagcaaatccatactaaaactcttatgtacattaacaaaggggatttgattaggttacctaggtaatcttctaaattatgtttttcttctaggtgagccggatcccccaaggaaattagaagtgactgaaatgaccaagaacagtgccaccttagcctggttacctcccctacgtgatggaggtgctaaaatcgatggctacatcactagttacagagaagaagagcagcctgcagatcgctggacagagtactcagtggtaaaagatctgagccttgttgtcactggcctaaaggaaggaaagaaatacaaatttagagtagcggccagaaatgctgttggagtcagtttgccaagagaagctgaaggagtgtatgaagccaaagaacaactgtgtaagtagtctttgcttcatttatgtcatgtggtaagtttattagaatttcttcttttatatgtagacatttctccctgaggaatctagctctagaaattcttgaaaaacagtagagaacagtggctttcaaacacatgagtgggccaaaaacacacagtaaataaacttatacaaacacatatataactaaaaaacatttcctgaaacaatacccatttattatcatgtgcattcttatgttttctaccctattctgtgtttttaaaaatattggctgtacaacaaacatatgaagaaaagctcatcaccactggtcactagagaaatgcaaatcaaaaccacaatgagataccatctcacaccagttagaatggtgatcactaaaaagtcaggaaacaacaggtgctagagaggatgtggagaaataggaaagcttttacactgttggtgggagtgtaaattagttcaaccattatggaagacagtgtggcgattcctcaaggatctagaaccagaaataccatttgacccagcaatctcattactgggtatatacccaaaggattataaatcattctactataaagacacatgcacatgtatgtttattgtggcactgttcacaatagcaaagacttggaaccaacccaaatgcccatcaatgacagactggataaagaaaatgtggcaccacatttacaccacaggatactacgcagccataaaaaaggatgagttcatgtcctttgcagggacatggatgaagctggaaaccatcattctcagcaaacacaagaacagaaaaccaaacaccacatgttctcactcataagtgggagctgaacaatgaaaacacatggacacagggaggggagcatcacacactggggcctgtcaggggttgggaggctaggggaaggatagcattaggagaatacctaatgtagacgatgtgttgatgggtgcagcaaatcaccatggcacatgtatacctatgtaacaagcctgcacattctgcatatgtatcccagaacttaaagtatatattaaaaaaaattggtggtaatacaagcattaatttgcaccagtatagctctccaccagaagaaacttatccaccttcccaaaattaatatcttttcattttactttcagtgccaccaaagatccttatgccagagcaaataactatcaaagctgggaaaaaactccgaattgaagcccatgtgtatggaaagcctcatcccacctgtaaatggaaaaaaggagaagatgaagttgtcacatccagccacctggcagtgcataaagcagacagctcttcaattctgatcataaaagatgtgactaggaaagacagtggttactacagcctcacagcagagaacagttctgggacagacactcagaaaatcaaagttgtagtcatgggtaagttaagtattagacaaatggccatctaaatatgaagctcagaaatatttttacgtatcaaatccttgttcttacatttctttcctcttggttcatgtagatgcccccggcccccctcagcctccatttgacatttctgatatagacgctgatgcttgctccctgtcatggcacatccctctggaggacggaggcagtaacatcaccaattatatagtggagaagtgtgatgtaagccgaggtgactgggtcacggctctagcttcagtcacaaaaacttcctgcagggttggaaagctgatcccaggccaggagtacatcttccgggtccgtgctgaaaaccgatttggcatttcagagcctctcacatctccaaagatggttgcgcagttcccatttggtatgtttttgtgaaggagaaaaaaagttgttttctttctagtttgttacttaatgtagaaactgacatcttccttgtcttcatctccaggtgttcctagtgaaccaaagaatgcacgagtcaccaaagtcaacaaggactgtatttttgttgcttgggacagaccagatagtgatggagggagccccattattggttatctgattgaacgcaaggaaagaaacagtttgctgtgggtgaaagccaatgatactcttgtccggtcaactgaatatccttgtgctggccttgtagaaggtcttgagtattcattcagaatctatgccctaaacaaagctggatccagcccacccagcaaacccacagaatatgtaactgcaagaatgccagttggtaagttttggggtttttttattgttgttgttgttttagtattatggaggcacatttaaatctcggagtctaagatttggactccaagacacagagagtagtagagatctgaagattacaactcccatttaagaatatgttctatctcttacaatgaagatgacatattaaaaaaagaaaaggacatataatttcctttaaagcatacagcaaggactcaaaagtgcatactagttggacggttattaaaatgggataattgtcttcctgttgagcttgttacttagcagcagggatgataatgtgaaatatggaagtttaaacttctgctggtaagataaatggtgagtgtacctctttttgttttagatcctcctgggaaacctgaggttattgatgtcaccaagagtactgtatctctgatctgggctcgtccaaagcatgatggaggcagtaaaattattggctatttcgtagaagcttgcaaacttcctggtgataaatgggtacggtgcaatactgcacctcaccagattccccaggaagagtacacagctactggcctagaagagaaagctcagtatcaatttagagctattgccaggaccgcggtaaacattagcccaccttctgaaccttctgatccagtgactatcctcgcagaaaatggtaagattctgctgagtattataggcaaagatgtaacagcattcatgatggtcatttttcctaataaaaaactaaatatacacctaaggaaaaaaggaaaattaaaatgatgttttgtatatagacacaaacattatgattatggagaatcataataacatgctaaattaaaaagcaagatacacaactgtggcaactatataatttcaatagttattcaatagtgcagttattatttgtctattaaaaataaacaaaatgaaataacactaaaattccattcttgaaagaagcagcatatgaatttcccactattattaataaggattacataatatagctttgcatacattaagtcctttatcttatttctttccagtccctcccaggatagacctgagtgtggctatgaaatctttgcttactgtgaaagctggaactaatgtctgcttggatgctactgtttttggtaaaccgatgccaacagtttcttggaaaaaagatggcacactgctaaaaccagcagaaggcataaagatggccatgcagcggaatctgtgcaccttggagctattcagcgtgaaccggaaggactcaggagactataccattactgctgaaaattcaagtggttctaaatcagccaccattaagcttaaagtgttaggtaactaataaacttcattggaatcccatattttactttggataatgggatgtaaataggatttacagaataatgtgggagaagacattcatattctaatgtgtatttcctatgcacagaattattcttatgacagaaccacgttttagagttaaaaagagctttagaaatcacatatttcaattacctaattttacaagtgaagaaactaagattctaaaaaattaactaacctcctaggtcatataggaaattgacaatagaaagactgcagcccaggtctccagacctctactctatactcattccccattccacatattcactcttcttccttattccttcagataaaccgggtcctccagcatctgttaaaatcaacaaaatgtattcagatcgtgctatgctttcttgggaaccgcctcttgaagatggaggctcagaaatcaccaactatattgttgacaaacgtgaaacaagcaggcccaactgggctcaagtctctgcaactgtgcctatcaccagctgcagcgtggagaaacttatagagggccatgagtatcagttccgtatttgtgctgaaaataaatatggagtaggcgatccagtcttcactgaaccagcaattgccaaaaacccatatggtaggaacatttcccggtggtttttcattttattttttaaaattatcttttagcctgggaaattaacttttcaatcaatttctgcagacccaccaggacgctgtgatcctcctgttattagcaacataaccaaagatcacatgacagtcagctggaagccaccagcagatgatgggggctcacccatcactggctatttgcttgaaaagcgggaaacccaggctgttaactggactaaggtcaacagaaaacctattatagaaagaacattaaaagcaacaggtcttcaagaaggtaccgaatatgagttccgtgttacagctataaataaagctggaccaggcaaacccagtgacgcatccaaggccgcttatgctcgggaccctcagtgtaagtgttcatgaacgagttccatatcctgtgttaaaagcagcattaaacacccaggaaggaagttttcatgaaaatttcctatcattatttattctcagatcctcctggcccaccggctttccctaaagtatatgatacaactcgcagctctgtgagtctatcttggggcaagccagcctatgacggcggcagccctatcattggttatctcgttgaagtaaaacgggctgactccgataactgggtgaggtgcaacttaccacagaatctacagaaaacccgctttgaggttactggcctgatggaagacacacaatatcaattccgtgtgtatgccgttaataagattggatacagtgaccccagtgatgtgccagataaacactatcccaaggacatcttaagtaagtattaccagggggagtacataaggcttttcctattaatcatattctaagagggagactagaactcccttaggtagattaatttattaacaaggtgtagagctggtaactccaagagtactttttaggagagctgggtgggtactttacggtattgtggaacaggcaaatcaaatgcacatgatttgtggttttgaaaagcttttcatatatataagaatttcctgtcttcaaaagacatgaaatgagagaattttattggaatgtaagaattttattttaggaataaagaggccttttaactaagtagtgagctatttactattcttagggtttctgttttccaatccaccatctccctaagtatgtgactggtgggctctccatcttaatttcccttcttcttatttcttctatttgcttatcctccatgataatttcccctttatttgaattacttgatattatatgtcaccctccaggtacttttcttcctactatgaaataataaagagagctagaatatgtggcagaataccttcatggaatatagaaaggaaaaaacaagaatgaaagggagccaaaaatcaatcgtctactttccttttaatatatgtagcatttcagagtacataaggctcatgaaagaggaggtacagatcctccggggggaaaacctggttaagcctaaagcatagtggaaaatggaaagatcaacaattagtacagaacagaaaaatgattttgaggattgtattaaggaagttttaaagaacaagaaatcagctctagaaaataaatgtattttaggagtgacaaggccagtccctggaaatacatttgactattaaatttttatttaacttcttcacccaaaattaaacagttccacctgagggagaacttgatgcggacttaaggaagacactcatattacgtgctggagttactatgagactatatgtaccagtaaaaggacgcccacctccaaagattacttggtctaaaccaaatgtcaatctaagagacaggattggactggacataaagtcaactgactttgacactttcttgcgctgtgaaaatgtgaacaaatatgatgcaggaaaatatatcttaaccctggagaacagctgtggtaaaaaggaatataccattgttgtgaaagtgcttggtaagtctatttcaaaaaagaatcatatatattttaaaatagcttatgtattttttacacattcatttcttatttacctactatttatccagatactcctgggccacctgtcaatgtgactgttaaggaaatatccaaagactctgcttatgttacctgggagcctcccattattgatggcggaagccccatcataaactatgtggtacaaaaacgtgatgcagagaggaaatcctggtctacagtgacaactgagtgctccaaaacaagcttcagagtagctaatttggaggagggaaaatcctacttcttccgagtgtttgctgaaaatgagtatggcattggtgatcccggtgaaactcgtgatgctgtcaaagcttcccgtaagcaaatgaaccatcatcccatcattttgagttatatccttcctttgttatatggggcttacacttatcatttctcctttgctttagaaactcctggaccagttgtggacctgaaagtgaggtctgtatctaagtcatcctgtagcattggctggaaaaagcctcacagtgatggtggaagtcggattattggatatgtagttgatttcctgactgaagaaaataagtggcaacgagttatgaaatccttaagcctacagtactctgcaaaagatttgactgaagggaaggaatataccttcagagtgagtgctgagaatgaaaatggagaaggaaccccaagcgaaatcactgttgtggcaagggatgatgttggtaaggctctatgcacacatcttcatttttcctttattgtcatcgaaagtgcactcttgtgtcccactcactagcttatctaaaaatccgttaaaagctagaactatttgaaaaagttaatcgcctggccttaaaaataacagtaatttatctctgctattttacagtggctcctgatcttgacttaaagggtctacctgatttgtgctacttggctaaagaaaacagcaacttccggcttaagatccccataaaaggcaagccagctccatcagtctcctggaagaaaggggaagatcctctagcaactgacactagagtcagtgttgagtcatctgcggttaacacaactcttatagtgtacgattgccaaaaatctgatgctggaaaatacacaatcacacttaagaatgttgctggcaccaaggaaggaactatctccataaaggttgttggcaagcctggcatccccactggaccaatcaaatttgatgaagtcacagcagaagccatgaccttaaagtgggctcctccaaaggatgatggaggttctgaaatcaccaactatatcctagagaagagggattctgtgaacaacaagtgggtgacgtgcgcctcagctgtccagaaaaccacctttagagtaaccagacttcatgagggcatggaatataccttcagggtcagtgccgaaaataaatatggtgtaggggaaggcctgaaatcggagccaattgttgcgagacatccatttggtaagtgtcttaaattcagaagacgtaaagcaaaacacggttttgaggaggcttcttattataaatcttgcattatctacttttttctagatgtgcctgatgctcccccacctcccaatattgtggatgtcagacacgattcagtatctctaacttggactgaccccaagaaaactggtggttctccaattacaggtattttgtttgttcttatcctacagcttttacatcaagattcctcacaaatatttccctgagaacagttgaacatgtgcttatcgataacattatctgcttatacagaaatgtgtttttatttcagtacatatggttaatgtttaattttattgaaaatatcctaatgtaatagttaataaagtatttcttaattataatatctatttttgtaagttaaaattgttcaccaaaaaagacaacaactatgcatattccaagaggaaaaaaaaaatggcactatgcttgggtaataaaagtatagatactagcaagaatgactacttgttcaatatatatggatatgtataaataatttgggcaacacatatatattgtaaaatcaagctgcatttatacttgatacatccctgggtcttttgtagggtatcatctcgagttcaaggaaagaaacagccttttgtggaagagagctaacaagactccgataaggatgagagactttaaagtgacaggattaactgaaggtcttgaatatgaattccgagttatggcaatcaatttagcaggtgtgggcaagccaagcctaccatcagagcctgttgtggcactggacccaattggtaagtcattatatgaagaaaaacccaggtgcatgttttacatgaagaaaactggtatttgtttgactggttttgcttttatgttttagatcctcctggaaaacctgaggttattaacataacaaggaattcagtgactctcatttggactgaacctaaatatgacggtggtcataagttaactggatatatagtggagaagcgagatctaccttcgaagtcttggatgaaagccaaccatgttaatgtcccagaatgtgcctttactgtaactgaccttgttgagggtggaaaatatgaattcagaattagagcaaagaatacagcaggtgctatcagtgctccatcagaaagtacagaaaccattatttgcaaggatgaatacggtaggtccattttactttttatgtacttttttttttaaagcaaattaagcctccttccttttctgattaaaatgtatttttttctttgcagaggcaccaacaattgtccttgatcccacaataaaagatgggctaacaattaaagcaggggataccattgttttgaatgccattagcattcttggcaaaccccttccaaaatcaagttggtccaaggcaggaaaagacattagaccatcagatatcactcagataacttcaaccccaacatcttccatgcttactatcaagtatgccactagaaaagatgcgggtgaatataccatcactgctaccaatccttttggcacgaaggtggaacatgtgaaggtaacagtccttgatgtacctggtcccccaggtcctgttgaaatcagtaatgtttctgctgaaaaagcaacacttacatggacacctcccttggaagatggcggctcaccaattaagtcctatatacttgaaaagagagaaaccagccgacttttgtggacagtggtttctgaagatattcagtcttgcaggcatgtggcaaccaaacttatccaaggaaatgagtacatcttccgggtctcagctgtaaaccactatggcaaaggagaacctgtacagtctgaacctgtcaaaatggtagacagatttggtatgtagagcatgtgagggaattgacatggaaacatttatagcagagtttaggaaatcatggatttctaataaatttgcttccttttcaggtccccctggccctcctgaaaaaccagaggtatcaaatgtcactaagaacactgccactgtcagctggaaaaggccagtggatgatggtggcagcgaaattacaggatatcatgtagaaaggagagaaaagaaaagcctgcgatgggtgagagcaataaaaacaccagtttccgatctcaggtgcaaagtaacaggactgcaagaaggaagcacctacgaattccgtgtcagtgcagaaaacagagcaggaattggtccacccagtgaggcttcagattctgttctgatgaaagatgcagcatgttagtatttgtctttttcaacaccgttcattccagagtgccaatattttatctaaattacccaaaagccaaactctgaatatatacttttgtgtctttgtttctttctcagatcctccaggaccaccttcaaatccgcatgtcactgatactaccaagaaatctgcttctttggcatggggcaagcctcattatgatggtggacttgaaatcactggctatgtcgtggagcatcaaaaagtaggagacgaggcctggataaaagataccacaggaaccgccctcagaatcactcagttcgttgttcctgatcttcagactaaagaaaaatacaacttcagaatcagtgccatcaacgatgcaggtgttggggagccagcggtgattccagatgttgaaatcgtagaacgggagatggctcctgattttgaactagatgccgagcttcgaagaacacttgttgttagagcaggactcagtattaggatatttgtgccaattaaaggtcgtcctgctcctgaagtgacatggaccaaagataacatcaacctgaaaaaccgagccaacattgaaaatacggaatcatttactcttctgattatcccagaatgtaacagatatgataccggtaaatttgtcatgaccattgaaaacccggctgggaagaaaagtggctttgtgaacgtcagagtcttggacacgccaggcccagtcctcaacctgcggcctacagacatcacaaaggacagtgtcaccctgcactgggacctccctctgatagatggaggctcacgtataacaaactacattgtagagaaacgtgaagcaacacggaaatcttattccacagccaccactaagtgccataaatgcacatataaagttaccggcttgtctgaagggtgtgaatatttcttcagagtgatggcagagaatgaatatggaattggtgagccaacagaaactacagagcccgtaaaagcctctgaagcaccatctccaccagacagccttaacatcatggacataactaagagcaccgtcagcctggcatggcctaagcccaaacacgatggtggcagcaagatcactggctatgtgattgaagcccaaagaaaaggctctgaccagtggacccacatcacaaccgtgaaagggttagaatgtgttgtgaggaatctaactgaaggagaggaatataccttccaagtgatggcagtgaacagcgcggggagaagtgcccctagagaaagcagacccgtcattgtcaaggagcagacaatgcttccagagctggatctccgtggcatctatcagaaactggtcattgccaaagctggtgacaacatcaaagttgaaattccagtgctcggtcgaccgaagcccacagtgacatggaaaaaaggagaccaaattcttaaacagacacagagagttaattttgaaaccacagcgacttcaaccattttaaatatcaatgagtgtgtcagaagtgatagtgggccctatccattaacagcaaggaacattgtaggagaggttggtgatgtcatcaccattcaagtccatgatatcccagggccacctactggaccaatcaaatttgatgaagtttcatctgattttgtaaccttctcttgggacccacctgagaacgatggtggtgtaccaataagcaactatgtagtggaaatgcggcagactgacagtactacctgggttgagttagcaaccaccgttatacgtactacctataaagccacccgccttactactggattagagtatcagttccgtgtaaaagctcagaatagatatggagttggaccaggcatcacatcagcatgcatagttgccaactatccatttaaggttcctggacctcctggtacccctcaggtaactgcagttaccaaggattcaatgacaattagctggcatgagccactttctgatggtggaagccccattttaggatatcatgttgaaagaaaagaacgaaatggtattctctggcagactgtgagcaaagctttagtaccaggcaacattttcaaatcaagtggacttacagatggtattgcttatgagttccgggtgattgcagaaaacatggcaggcaaaagtaagccaagcaagccatcagaacctatgttggctctggatcccattgacccacctggaaaaccagtacctctaaatattacaagacacacagtaacacttaaatgggctaagcctgaatatactgggggctttaaaattaccagttatatcgttgaaaagagagaccttcctaatggacggtggctgaaggccaacttcagcaacattttggagaatgaatttacagtcagtggcctaacagaagatgctgcatatgaattccgtgtgatcgccaaaaatgctgcaggtgccatcagtccaccatctgagccatctgatgctatcacttgcagggatgatgttgaggcaccaaagataaaggtggatgttaaatttaaggacacggttatattaaaagcaggtgaagcattcagactggaagctgatgtttcaggccgcccacctccaacaatggaatggagcaaagatggaaaagagctggaaggcacagcaaagttagaaataaaaattgcagatttctctactaatctggtaaacaaagattcaacaagaagggatagtggtgcctatacccttacagcgactaatcctggtggctttgctaaacacattttcaatgtcaaagttcttgacagaccaggcccacctgaaggacctttggctgtaactgaagtgacatcagaaaagtgtgtactatcatggttccctccactggatgatggaggtgccaaaattgatcattacatagtacagaaacgtgaaaccagcagattggcatggacaaatgtagcctcagaagtccaagtaacaaagctaaaggtcactaaactcttgaaaggcaatgaatacatattccgtgtcatggctgtaaataaatatggagtgggagagccactggaatcagagcctgtgcttgcagtgaatccttatggaccccctgatccgcccaaaaaccctgaagtgacaactattactaaagattcgatggttgtctgctggggacatcctgattctgatggtggaagtgaaatcatcaattatattgtggaacggcgtgataaagctggccaacgctggattaaatgcaacaaaaaaactcttactgatttaagatataaagtgtctggactgacagaaggacatgaatatgagttcaggattatggctgaaaatgctgctggaattagtgcaccaagtcctaccagtccattttacaaggcttgtgacactgtgtttaaacctggaccaccaggtaacccacgtgttctggatacaagcagatcatccatttcaatcgcttggaataaacctatctatgatggtggttcagaaatcactgggtatatggttgagattgccctgccagaggaagatgaatggcagattgtcactccaccagcaggactcaaggcaacttcgtatactatcactggcctcacagagaatcaggaatataagatccgcatctatgccatgaattccgaaggacttggggaacctgcccttgttcctggaactccaaaggctgaagacagaatgctgcctccagaaattgaactggatgctgacctgcgcaaagttgttactataagggcctgctgcaccctgagactttttgttcccatcaaaggaaggcctgcacctgaggtgaagtgggcccgggaccatggagaatctttagataaagctagcatcgaatccacaagctcttacaccctgcttattgttggaaatgtaaacagatttgacagtggcaaatatatactaactgtagaaaatagttcaggcagcaagtctgcatttgtcaatgttagagttctcgatacaccaggccccccacaggatctgaaggtaaaagaggtcactaagacatctgtcacactcacatgggacccacctctccttgatggaggttcaaaaatcaagaactatattgttgaaaagcgggaatcaacaagaaaagcatattcaactgttgcaacaaactgccacaagacttcctggaaggtagaccagcttcaagaaggctgtagctactatttcagggttctcgcagaaaatgaatatggcattgggctgcctgctgaaaccgcagaatctgtgaaagcatcagaacgacctcttcctccaggaaaaataactttgatggatgtcacaagaaatagtgtgtcactctcttgggagaaaccagagcatgatggaggcagccgaattctaggctacattgtggagatgcagaccaaaggcagtgacaaatgggccacgtgtgccacagtcaaggtcactgaagccactatcactggattaattcagggtgaagaatactctttccgtgtttcagctcagaatgaaaagggcatcagtgatcctagacaactgagtgtgccagtgatcgccaaagatcttgtcattccaccagccttcaaactcctgttcaatactttcactgtactggcaggtgaagacctaaaagttgatgttccattcattggccgccctaccccagctgtaacctggcataaagataatgtaccactgaagcagacaactagagtaaatgcagagagcacagaaaataattcactactgacaataaaggacgcctgccgagaagatgttggccattatgtggttaaactgactaactcagctggtgaagctattgaaacccttaatgttatcgttcttgacaaaccagggcctccaactggaccagttaaaatggatgaagtgacagctgatagtattactctttcctggggcccacccaagtatgatggtggaagttctatcaataattacattgttgagaaacgggacacttccacaaccacctggcaaattgtatcagctacagttgcaaggacaacaataaaggcttgcagactgaagactggatgtgaatatcagtttagaattgcagctgaaaacagatatgggaagagtacctacctcaattcagagcctactgtagcccaatatccattcaaagttcctggtcctcctggcactccagttgtcacactgtcctccagggacagcatggaagtacaatggaatgagccaatcagtgatggaggaagtagagtcattggctatcatctagaacgcaaggaaagaaatagcatcctctgggttaagttgaataaaacacctattcctcaaaccaagtttaagacaactggccttgaagaaggtgttgaatatgaatttagagtctctgcagagaacatcgtgggcattggcaagccgagtaaagtatcagaatgttatgtggctcgtgacccatgtgatccaccaggacggccagaggcaatcattgtcacaaggaattctgtgactcttcagtggaagaaacccacctatgacggtggaagcaagatcactggttatattgttgagaagaaagaattacctgagggccgttggatgaaagccagttttacaaatattattgacactcattttgaagtaactggcctagttgaagatcacagatatgagttccgggttatagcccgaaatgccgcaggagtgtttagtgagccttcagaaagcacaggagcaataacagctagagatgaggtagatccaccacgaataagtatggatccaaaatacaaagacacaatcgtggttcatgctggtgaatcattcaaggttgatgcagatatttatggcaaaccaataccaaccattcagtggataaaaggtgatcaggagctttcaaacacagctcgattagaaataaagagcaccgactttgccaccagtctcagtgtaaaagatgcagtacgtgtcgacagtggaaattacatactgaaggccaaaaatgttgcaggagaaagatcagttactgtgaatgtcaaggttcttgacagaccagggccacctgaaggacctgttgttatctcaggagttacagcagaaaaatgcacactagcttggaaacccccacttcaggatggtgggagtgacatcataaattatattgtggaaaggagagaaaccagccgcttagtttggactgtggttgatgccaatgtgcagactctcagctgcaaggttactaagcttcttgaaggcaatgaatatactttccgtataatggcagtaaacaaatatggtgttggtgaacctcttgaatctgagccagtagttgccaagaatccatttgtagtaccagatgcaccaaaagctccagaagtcacaacagtgaccaaggactcaatgattgttgtatgggaaagaccagcatctgatggtggtagtgaaattcttggatatgttcttgagaaacgggataaagaaggcattagatggacaagatgccataagcgtctgattggagagttgcgcctgagagtaactggactcatagaaaatcacgattatgagttcagagtttctgctgagaatgctgctggacttagtgaaccaagccctccttctgcttaccaaaaggcttgtgatcctatttataaaccaggacccccaaacaaccccaaagtcatagacataaccagatcttcagtattcctttcttggagcaaaccaatatatgatggtggctgtgaaattcaaggatacattgttgaaaaatgtgatgtgagtgttggtgaatggacaatgtgcactccaccaacaggaattaataaaacaaacatagaagtagagaagctgttggaaaagcatgaatacaacttccgtatctgtgctattaataaagctggagttggagaacatgctgacgtccctggacctattatagttgaagaaaaattagaagcaccagacattgatcttgacctagaactaaggaaaatcataaatataagggcaggtggctccttaaggttatttgttcctataaaaggtcgtcctacaccagaagttaaatggggaaaggtggatggtgaaatccgagatgcagctataattgatgtcactagcagtttcacctctcttgttcttgacaatgtcaaccgatatgatagtggaaaatatacgcttacattagaaaacagcagtggaacaaagtctgcctttgttactgtgagagttctggacacgccaagtccacctgttaacctgaaagtcacagaaatcaccaaagactcagtatcaattacatgggaacctcctttgttggatgggggatccaaaataaaaaattacattgttgagaaacgtgaagccacaagaaaatcatatgctgctgttgtaactaactgccataagaattcttggaaaatcgatcagctccaagaaggttgcagttattactttagagtcacagctgagaatgagtatggtattggccttcctgcccagactgctgatccaattaaggttgcagaagtgccacaacctcctggaaaaataactgtggatgatgtcaccagaaacagtgtctctctgagttggacaaaacctgaacatgatggtggcagtaaaatcattcagtatattgtggaaatgcaagctaaacacagtgagaaatggtcagagtgtgctcgagtaaagtctcttcaggcagtaattaccaacctaactcaaggggaagaatatctttttagagttgttgctgtaaatgaaaaggggagaagtgatcctcggtcccttgcagttccaatagttgccaaagatctggtaattgagccagatgtaaaacctgcattcagtagttacagtgtacaggttggccaagatttgaaaatagaagtgccaatttctggacgtcctaagccaaccattacctggactaaagatggtctcccactgaagcagaccacaagaatcaatgttaccgattcactggatctcaccacactcagtattaaagaaactcataaggatgatggtggacaatatggaatcacagttgccaatgttgttggtcagaagacagcatccatcgaaattgtaactctagataaacctgatcctccaaaaggacctgttaaatttgatgacgtcagtgctgaaagtattacattatcttggaaccctccattatatacagggggctgccaaatcaccaactacattgttcagaaaagagatacaaccaccacagtatgggatgttgtttctgctactgttgctagaactacactcaaagtgaccaaactgaaaactggtacagaataccaatttagaatatttgccgaaaacagatatggacaaagctttgccttagagtctgatccaattgtagctcaatatccctacaaagaaccaggccctccaggtacaccatttgccacagccatttccaaagactccatggtcatacagtggcatgaaccagtcaacaatggtggaagccccgtcataggttaccacctggagagaaaagaaagaaacagtattttgtggacaaaggtcaacaaaactattattcatgacacccaattcaaagcacagaatcttgaagaaggcattgaatatgaattcagagtgtatgctgaaaatattgttggtgtaggcaaagcaagcaagaattctgaatgctatgtagccagagatccctgtgacccaccaggaaccccagaaccaataatggttaaaagaaatgaaatcactttacagtggaccaaacctgtgtatgatggtggaagtatgattacaggctacattgtagagaaacgtgatttgcctgatggtcgttggatgaaagctagctttacaaatgtcattgaaactcaatttactgtgtcaggtcttactgaagatcaaagatatgaattcagagtcattgcaaagaatgcagctggtgcaataagtaaaccctctgacagtactggaccaataactgccaaggatgaggttgaactcccaagaatttcaatggatccaaaattcagagacacaattgtggtaaatgctggagaaacattcagacttgaggctgatgtccatggaaagcccctacctaccattgagtggttaagaggagataaggaaattgaagaatctgctagatgtgaaataaagaacacagatttcaaggctttacttattgtaaaagatgcaattagaattgatggtgggcagtatattttaagagcttccaatgttgcaggttctaagtcattcccagtaaatgtaaaagtattagatagaccaggacctccagaagggccagtccaggttactggagtcacttctgaaaaatgctctttaacatggtctccaccacttcaagatggtggcagtgacatttctcactatgttgttgaaaagcgagaaaccagtcgacttgcctggactgttgttgcttcagaagttgtgaccaattctctgaaagttaccaaactcttagaaggtaatgaatatgttttccgtataatggctgtcaacaaatatggtgttggagagcctttggaatctgcaccagtactaatgaaaaatccatttgtgcttcctggaccaccaaaaagcttggaagtcacaaatattgccaaagactccatgaccgtctgttggaaccgtccagatagtgatggtggaagtgagattattggttacattgtagagaaaagagacagaagtggcattcgatggataaaatgtaataaacgccgcattacagatttgcgtctaagagtgacaggattaacagaagatcatgagtatgaattcagggtctctgcagaaaatgctgctggagttggggaaccaagtccagctacagtttattataaagcctgtgatcctgtgttcaaacctggcccacctaccaatgcacacattgtagacaccactaaaaattcaatcacacttgcctggggtaaacccatctatgatggcggcagtgagatcttgggatatgtagtagaaatctgtaaagcagatgaagaagaatggcaaatagttactccacagactggcctgagagtcactcgatttgaaatttcaaaactcactgaacaccaagagtataaaatacgagtctgtgccctcaacaaagttggtttaggtgaggctacatcagttcctggtactgtgaaaccagaagataaacttgaagcacctgaacttgaccttgactccgaattaagaaaaggaattgttgtaagagctggtggatctgccagaattcacattccattcaaaggtcgtccaacgcctgagatcacttggtctcgagaggaaggtgaattcacagataaggtccaaattgaaaagggagtaaactatacccaactatcaatagataactgtgatagaaatgatgctggaaaatacattcttaagttggaaaacagcagtggatcaaagtctgcttttgtaactgtgaaagttcttgacactccaggaccaccacagaatttggcagtcaaagaagtgagaaaagattctgccttcctggtatgggagccacccatcattgatggaggggcaaaggtcaagaactatgtgattgacaaacgtgagtcaaccagaaaagcgtatgctaatgtgagtagtaaatgcagcaaaacaagttttaaagtggaaaaccttacagaaggagccatttattacttcagagtcatggctgaaaatgaatttggagttggtgttccagtggaaactgttgatgccgtgaaagctgctgaacctccttccccaccaggaaaggttacactcactgatgtgtcccagaccagtgcatcacttatgtgggagaaacctgaacatgatggcggtagcagagtcctggggtacgttgttgaaatgcagcccaaaggaactgaaaaatggagcattgtggctgaatccaaagtctgtaatgcagttgttactggtttgagttctggacaagaatatcagttccgtgtcaaggcttataatgagaaaggaaaaagcgatccaagagtgttgggtgttcctgtcatagccaaggacttgactatacagcctagtttaaagttaccatttaacacatatagtatccaagctggagaagatcttaaaatagaaattccagttataggccgaccaagacctaacatttcttgggtcaaagatggtgagcctcttaaacagacaacaagagtaaacgttgaagaaacagctacctcaactgttttgcacattaaagaaggtaacaaagatgactttggaaaatacaccgtaacggcaacaaatagtgcaggcacagcaacagaaaatctcagtgttatcgttttagaaaagcctggacctccagttggcccagttcggtttgatgaagttagtgcagactttgtagtcatatcttgggaacctccagcctatactggtggctgccaaataagcaactacattgtagagaagcgagatacaaccaccaccacttggcacatggtatcagcaacagttgcaagaacaacaattaaaataaccaaactgaaaacaggcacggagtaccagtttagaatttttgctgaaaacaggtatggaaaaagtgccccactggattctaaggcagttattgtacaatatccatttaaagaacctggaccacctggaactccttttgtgacatcaatctcaaaagatcagatgcttgtgcaatggcatgagccagtgaatgatggaggcaccaaaattattggctaccatcttgaacagaaagaaaagaacagtattttatgggtcaagttaaataagacccccattcaggacaccaaattcaaaacaactgggcttgatgagggccttgagtatgagttcaaagtttctgctgaaaatattgttggcattggcaagcctagcaaagtgtcagaatgctttgttgctcgtgatccatgtgacccacctggtcgccctgaagccattgttattacaagaaacaatgtcacactgaaatggaagaaacctgcctatgatggtggtagcaaaataacaggttatattgtagaaaagaaagatctacctgatggccgctggatgaaagccagctttaccaacgtattagaaactgaatttacagtgagtggacttgtagaagaccaaagatatgaatttagagtaattgcaagaaatgcagctggaaactttagtgaaccatctgatagtagtggtgccattactgcaagagatgaaattgatgcaccaaatgcctctctggatccaaaatataaagatgtcatcgttgttcatgcaggagagacttttgttcttgaagccgacatccgtggcaaacctatacctgatgttgtttggtcaaaagatggaaaagaacttgaagaaacagctgctagaatggaaattaaatctactattcagaaaacaactcttgttgtcaaagactgtatacggactgatggaggacaatatattctgaaactcagcaatgttggtggtacaaagtctatacccatcactgtaaaggtacttgacaggccagggcctcctgaagggcctctgaaagttactggagttactgcggaaaaatgttacctggcatggaacccacctttgcaagatggtggtgctaatatttcacattacatcattgaaaagagggagacaagccgactctcttggacccaggtttcaactgaggtacaggcccttaactacaaagttactaaacttcttcctggtaatgagtacattttccgtgtcatggctgtgaataaatatggaattggagagcccttggaatctgggcctgttacggcctgtaatccttataagccaccaggtcctccctcaacacctgaagtctcagcaatcaccaaagattctatggtagtaacatgggcacgcccagtagacgacggaggtaccgaaattgagggctacattcttgaaaaacgagataaggaaggcgttagatggaccaagtgcaacaagaaaacattaacggatctgcggctcagggtaactggtcttaccgaaggccattcctatgaattcagagttgctgctgaaaatgcagctggtgtgggagaacctagtgagccatctgttttctaccgtgcgtgtgatgccttgtatccaccaggtcccccaagcaatccaaaagtgacggacacttccagatcttctgtctccctggcatggagtaagccaatttatgatggtggcgcacctgttaaaggctatgttgtagaggtcaaagaagctgctgcggatgaatggacaacctgcactccaccaacaggattacaaggaaagcagttcacagtgaccaagcttaaagaaaacactgaatataacttccgtatttgtgccatcaattctgaaggtgtaggtgaacctgcaactctacctggctcagtggttgctcaggagaggatagagccaccagaaatagaactcgatgctgatctcagaaaggtggtcgttctgcgtgcaagtgctactttacgcttatttgtcactatcaaaggtcgaccagaacccgaagttaaatgggaaaaggcagaaggcattctcactgacagggctcagatagaggtgaccagctcatttacaatgttggtgattgataatgttaccagatttgacagtggtcggtataatctgacattagaaaataatagtggctccaaaacagcttttgttaacgtcagagttcttgactcaccaagtgcccctgtgaatttgaccataagagaagtgaagaaagactcagtgacgttgtcctgggaaccaccacttattgatggtggagctaagattacaaactacattgtcgaaaaacgagaaactacaagaaaagcctatgctaccattacaaataattgcactaaaactactttcagaattgaaaatctacaagaaggatgttcttactacttccgagtcttggcttccaatgaatatgggattggtttgccagctgaaacaacagaacccgttaaagtgtctgaaccacccctcccacctggaagagtaactcttgttgatgtgacccgtaatacagctacaattaagtgggagaaaccagaaagtgatggtggcagcaaaattactggttatgtggttgaaatgcagactaaagggagtgaaaagtggagcacctgcacacaagttaagactctagaagcaactatatctggcttaactgcaggagaagagtatgtcttcagggtagctgcagttaacgaaaagggaagaagtgatccaagacaacttggagtgccagtaattgcaagggatattgaaataaagccttcagttgagcttcctttccatactttcaatgtaaaggctagagaacaacttaagattgatgtgccattcaaaggaagacctcaagctactgtgaactggagaaaagatggtcagactcttaaagagacaactagagtcaatgtttcttcttcaaagactgtaacatcactatctattaaggaagcttcaaaggaagatgttggaacttatgaattatgtgtttcaaacagtgctggatccataacagttcctattactataattgtccttgacagaccaggacctccaggtcctatacgtattgatgaggttagttgtgacagcataaccatttcttggaatcctccagaatatgatggtggctgccaaattagcaattacattgttgaaaagaaagaaaccacctctacaacatggcacatagtttcacaagcagttgcaagaacatccattaaaatagttcgcctgacaacaggaagtgagtatcagttccgtgtttgtgcagaaaaccgctatggaaagagctcctacagtgaatcttcagctgttgttgcagagtatccattcagtcccccaggtcctcctggtactcctaaagttgtgcatgccacaaaatctaccatgcttgtaacctggcaagtgccagttaatgatggaggaagtcgagtaattggctatcatcttgagtataaagaaagaagcagcattctttggtcaaaagcaaataaaatcctcattgctgatactcaaatgaaagtctccggccttgatgaaggactgatgtatgagtatcgtgtatatgctgaaaatattgctggaattggtaaatgcagtaaatcttgtgaaccagtccctgcaagagatccttgtgaccctcctggacaacctgaagtcacaaatatcacaagaaaatcagtgtcacttaaatggtctaaaccacattatgatggtggagctaagatcacaggatacattgttgaacgcagagaactaccagatggccggtggctgaagtgcaattatactaatatacaagaaacatactttgaagtaactgaacttactgaagatcagcgttatgaattccgggtttttgcaaggaatgctgctgactcagttagtgagccatctgaatccactgggcctattatagttaaagatgatgttgagcctccaagagttatgatggatgtcaagttccgagacgttattgttgtcaaagctggagaggtccttaagataaatgcagacattgcagggcgacctctgccagtaatttcctgggccaaggatggtatagaaattgaagaaagagcaagaacagaaatcatctcaacagacaatcatactttgttaacagttaaagactgtataagacgagacactgggcaatatgtactaacactgaagaatgttgccggcactcggtctgtggccgttaattgcaaagtacttgataagcctggtccaccagcaggaccacttgaaataaatggcctcactgctgagaaatgctctctttcctggggacgtccccaagaagatggtggtgcagatatcgactattacatcgtagaaaaacgtgaaacaagccaccttgcatggacaatatgtgaaggagagttacagatgacatcctgtaaagtaaccaagttactcaaaggcaatgaatatatatttagagtaactggtgttaataaatatggtgttggtgagcccctagagagtgtagctataaaggcactagatccatttacagttccaagtccacccacgtctttggaaattacttctgtgaccaaagaatctatgacactttgctggtcaagacccgagagtgatggaggtagtgaaatatctggatatataattgaaaggcgagagaaaaatagcctaagatgggtgcgtgtaaacaaaaaaccagtttatgatctaagagtgaaatcaacaggacttcgggaaggatgtgaatatgaatatcgtgtttatgcagaaaatgctgctggcctaagtcttccaagtgaaacctctcccttaattagggcagaagatccagtgttcctaccatctcctccatccaaacccaaaattgtggactcaggcaagacaactataactattgcctgggttaagccgctgtttgatggtggggccccgataactggatatactgtagaatacaaaaaatctgatgacactgactggaaaacttccattcagagcttacgagggacagaatatacaataagcggactaacaacaggagctgaatatgttttcagagtaaaatctgtcaataaggttggtgctagtgaccccagtgatagctctgaccctcagatagcaaaggaaagagaagaagaacctttatttgatattgacagtgaaatgaggaagaccttgattgtcaaggctggtgcctcatttaccatgactgtgcctttccgaggaagaccagtacccaatgtcttgtggagtaagccagacactgacctccgtactagagcttatgttgataccacagactctcgtacatcactgaccattgaaaatgccaacagaaatgactctggaaagtacacattaacaattcagaatgttttgagtgctgcttcactgaccttagttgtcaaagttttagataccccaggtcctccaaccaacattactgtgcaagatgtaaccaaagagtctgcagtgttatcctgggatgttcctgaaaacgatggtggagcaccagtgaagaattaccacatagaaaaacgtgaggccagcaagaaagcatgggtctctgtgaccaacaactgtaaccgcctctcctacaaagttaccaatttacaagaaggagctatctattacttcagagtctctggagaaaatgagtttggtgttggtataccagctgaaacaaaggaaggagtaaaaataacaggtatgttttaagaataaggaaattctacatatccacgttaattttgctagaatagtgtgagtcattctaattagtcgttatttcatcttaaatgcttttgggttcacacccttcacaccccaaactattcatactatggcacaaaatggaatctctagtgaagagtctttcattgattaaaaaaacagaaatttacgtagctaaaattggataatatatgttgaatttaagtattattgaatctaactgtatatatatgtaggtatacatgtttatatatatatatacacagattatatatatatagtatgtgtgtatgacatatatcatatgtgtgtatgtgcgtgtgtacagaaattgtatataaagttttttaaaagattgttcatcttgttcctcttttttatccccatggtgaatttggagtaaattttatcatttaatctggtcattttacccttaatttggatttgaatgctatagcatgtaatgacatagcttgtgggagccttggttggttcagaagcaaaatgggttatgtaaaaaggaagactaaaatcaacataaaaatatggccttcatttaaaagttttcttttgacaatacatgaagagtgcacatttaaaagtgctgtaataattattcactttcttttgatgctttgttttcttagaaaaaccaagcccacctgaaaaacttggagtaacaagtatatccaaagacagtgtttccctgacctggctgaagcctgaacatgatggcggaagcagaattgtacactatgtcgttgaagcactagaaaaaggacagaaaaactgggttaaatgtgcagtggcaaagtcaacccatcacgttgtttccggtctgagagagaattctgaatactttttccgagtgtttgctgaaaatcaagctggcctgagtgacccgagagagcttctgcttcctgttcttattaaggagcaactaggtatgtctaattttgtgtagaagcaaaatttgaaattatttgcattgatttatgttaattttcagaaacactttttcactttcactttctatactcatttttcagaaccacctgaaattgatatgaagaatttcccaagtcacactgtatatgttagagctggttcaaaccttaaagttgacattccaatctctggaaaaccacttcccaaagtgaccttatcaagagatggtgtcccccttaaggcaaccatgagatttaataccgaaattactgctgagaacctgaccatcaatctcaaagaaagtgttacagctgacgctgggagatatgaaatcactgctgccaactccagtggtacaaccaaagctttcattaacattgttgtgctagacaggcctggtcctccaactggccctgttgttattagtgatataactgaagaaagtgtgactctcaaatgggagccacctaagtatgacggtggaagtcaagttaccaactacattctactcaaaagagaaacaagtactgcagtgtggactgaagtgtctgcaacagttgcaagaaccatgatgaaagtcatgaaactgaccacaggagaagaataccaattccgcatcaaggcagaaaaccgctttggcatcagtgatcatatagattcagcttgtgtgactgtcaaactaccatacagtaagttgtccaacttttcaaagatccaggttttcttttaccataaatgtgttattgtctgtactaatctataggatttctctcttttgtagcaacacctggaccaccatctacaccatgggtcactaatgttactcgagaaagcatcactgtgggctggcatgaaccagtgtcaaatggaggcagtgcagtcgtaggctatcacctggaaatgaaagacagaaacagtattttatggcaaaaagccaacaaactggtcatccgcacaactcacttcaaagtcacaacaatcagtgctggacttatttatgaattcagggtgtatgcagaaaatgctgctggagttggaaaacctagccatccttctgaaccagtcttggcaattgatgcttgtggtacgtatttgtcatgggaagggcagttctgataacaaaaatgcaaatcttacttctgcgaagcaaaatattataagtgccgctaatctgcttctcttattaccacagaacccccaagaaatgttcgtatcactgatatttcaaagaactctgtcagcctttcatggcaacaaccagctttcgatggaggtagcaagattacaggctacattgttgagagacgtgaccttccagatggcagatggaccaaggccagcttcaccaatgttactgaaactcaattcatcatctctggcttgactcagaattcccagtatgaattccgtgtctttgctaggaatgctgttggttccattagcaatccatctgaggttgtagggcccattacttgcatcgattcttatggtaagcatgcttagcactttgaatcaaaattgctatttaactcagtatttccgcataccttttcctggttctaatcctatagaataacttttactctgtgccttaatggggtttttggaagaaattatggactagctgggagtctgaggaaaattccttaaatacctttccagccctcttgacttgactgtaaagtgagagatttagacctcaggatatctatgggcctttccaacttcaaccttttatgattgattgtatgagttggtgctttcattctgttttaaattatcagagtcaataattaaaccatggttgagttcctagagaatattgctcttaaataagccacagactaaacagagacttcattttttggtttttttttttttgtttgtttgtttgtttgtttgttttgagacagagtctcactctgtcgcccaggctgtagtgcagtggcacggtcttggttcactgcaacttccgcctcctgggctcaaacgattctcgtgcctcagtcacctgagtagctgggattacaggcatgccccaccacacccagctaattttttgtatttttagtagggacggagtttcaccatgttggccaggcaggtctcaacctcctgacctcaggtgatccacccacctcggcctcccaaagtgttgggattacaggtgtgagccaccatgcctggtctaaacacagactttgatgatgatagtattagcagcagctaacatttattgaggaattttcatgaattctttcccttagttctcacagccctcatattagccatcttatagaagggaaactgaggctgagagtgcttttgtaacttccccgttagggatggagtgggaattcagacagacagacttcagagccctctctatcatggttagtccaaaatgcgtattcttcaccattctggaaaataagtggcacattcaactcaacaatgttttgaaaattaaaacgtcatgagagtcaggtatcctgtgacactttacctaaaagatctccatttgctaagagaaaattgagccactgtagtgtctgggcaaaagtatccacttccatcttcatgctgagaatctcagggctgttcattatttatgaatcaggctttgtggatactgaatcagtgtttatgagagtataaagcaagtcgaatttagttatctttcttgataattccaaacagcatggcagaaaatctgtccagtaattatgtagctctgtgggtagagaattcagactttaagtgtctgacatgaaccatccacacttggatatcagtgaactgggatgggaaaagaaaaagaataggaggtgcgtagaagaaaaggaaagaaaagctaaagtgaaaggaaatgttttaacagcttcttccatgatgttctcactaccatatcccatttcttcactggaataaagcaactaatggactttaaaacacatgtaaaaggtgcttaagtccctgcacaactcacagtctttctaccccatctgagatagaagagtggcctataaatttttaatttttaaataataattgcatagaattataatgatggtgtgtgtgtataatttaataatggccaatgaccttactttaaggttggtgcaactatttttttttccatccttataatattttaaatatttctcatctgtttttcttgcaggtggtcctgtaattgatttgcctctagaatatacagaagttgtcaaatacagagcaggtacatctgtgaagctcagagctggcatttctggcaaacctgcgcctactattgagtggtataaagatgataaagaattacaaaccaatgcactggtgtgtgttgaaaataccacggacctcgcatctatactcatcaaagatgccgatcgccttaatagtggatgctatgaattaaaactaaggaatgccatgggctcagcctcagccaccatcagagtacagatccttggtaggtgctgaatacagaccactgtcatattacatttgcctaaagcttagtaattttgaacaagtaggctttaaagaagtactaacatcgtgttttgtcctttcactgatagacaaaccaggcccacctggtggaccaattgaatttaagactgtaactgctgagaagatcacccttctctggcggcctccagctgatgatggtggtgcaaaaatcactcactacattgtggaaaagcgtgagacaagccgcgttgtgtggtctatggtgtctgaacatttggaagagtgcatcattacaaccaccaaaattatcaaaggaaatgaatacatcttccgggtccgagccgtgaacaaatatggaattggcgagccactggaatctgattccgttgtagccaagaacgcatttggtgagacatgatttcattagaaaactgaaacgtgaaaaatttaaaaataaactacgctaacctgtgcatatgctttaattttcttttatataacacctgtctcattaccatccttttcacaaggtgaaaaatataaaaaataaaaccaatgttcttggaaagaatgcgaacatcaaaggtataatttatcagtaatgtggattcttgtaccttgttttcccttcctttctaaatagttacacctgggccaccaggcataccagaagtgacaaagattaccaagaattcgatgactgttgtatggagcaggccaattgcagatggcggtagtgatataagtggctatttccttgaaaaacgagacaagaagagcctaggatggtttaaagtactaaaagagactatccgtgacaccagacaaaaagtaacaggactcacagaaaacagtgactatcaatacagagtttgtgctgtaaacgctgctggacagggtccattttctgaaccatctgaattctacaaagctgctgatcctattggtaagtgctcatacctgcagcatcttcacctgtgtcttctatattcacctgtgtgactaaattgtacatgattgtgtaattattttattgtgaatggccattccagatcctccaggtccacctgctaagataagaatcgcagattcaaccaagtcatccatcacccttggctggagtaagcctgtctatgatgggggcagtgctgttactgggtatgttgtcgagataagacaaggagaggaagaggaatggactactgtctctaccaaaggagaggtcagaactacagaatatgtggtatccaacctgaaacctggagtcaattactacttccgggtatctgctgtaaactgtgctggacaaggagaacctatagaaatgaatgaacctgtacaagctaaagatatacttggtatgtacctactggtttgattatgttttttaataagcatacttccaggaaatcactcttttttgcttttaaaattcactgtatgtatccattttatgtctacagaggcaccagagattgacctggatgtggctctcagaacttctgttattgccaaagctggtgaagatgtacaagtgttgattccctttaaaggcagacctccacctactgtcacatggagaaaagatgagaagaatcttggcagtgatgccagatacagcattgaaaacactgattcatcctcattactcaccattcctcaagttactcgcaatgatacaggaaaatatattctcacaatagaaaatggagttggtgaacctaagtcttcaactgtgagtgttaaagtgcttgacacaccagctgcctgccagaaactacaggttaaacatgtttctcgaggcacagtcactttgctctgggatcctcctctcattgatggaggatctccaataattaattatgtcattgaaaagagagatgccaccaagagaacatggtctgtcgtgtcacacaaatgttctagcacatccttcaagctaatagatttgtcggagaagactccattcttcttcagagttcttgcagaaaatgaaattggaattggggaaccctgtgaaactacagagccagtgaaggctgctgaagtaccagctcctatacgtgatctctcaatgaaagactcaacaaagacatctgtcatcctcagctggaccaaacctgactttgatggtggtagcgtcatcacagaatatgttgtagaaaggaaaggtaaaggtgaacagacgtggtcccacgctggcataagtaagacatgtgaaattgaggttagccaacttaaggagcagtcagtcctggagttcagagtgtttgccaaaaatgagaaaggactgagtgatcctgtcactattgggccaattacagtgaaagaacttattattacacctgaagttgacctgtcagatatccctggggcacaagtcactgtgagaattgggcacaatgtgcaccttgaattaccttataagggaaaacccaaaccatccatcagttggctgaaagatggcttgccactgaaagaaagtgaatttgttcgcttcagtaaaactgaaaacaaaattactttgagtattaagaatgccaagaaggagcatggaggaaaatacactgttattcttgataatgcagtgtgtagaattgcagtccccattacagtcatcacccttggcccaccatcaaagcccaaaggacccattcgatttgatgaaatcaaggctgatagtgtcatcctgtcatgggatgtacctgaagataatggaggaggagaaattacttgttacagcatcgagaagcgggaaacttcacaaactaactggaagatggtgtgttcaagtgttgccagaacgactttcaaagttcctaatctagtcaaagatgctgagtaccagtttagagtgagagcagaaaacagatacggagtcagccaaccacttgtctcaagcattattgtggcaaaacaccagttcaggattcctggtcccccaggaaagccagttatatacaatgtgacttctgatggcatgtcactaacttgggatgctccagtttatgatggtggttcagaagttactggattccatgttgaaaagaaagaaagaaatagcatcctctggcaaaaagttaatacatcaccaatctctggaagagaatatagagccactggactggtagaaggtctggattaccaattccgtgtatatgctgaaaattctgctggcctaagctcacctagtgacccaagcaaatttaccttagctgtttctccagtaggtaagtgattattattcaaatacatttagtttagcaattgaacatattagaaacaaatatatcaaggaatgcttttcttctctgcatcaccttcttacatatcttcttgtcactagagaactggtcatgtaaagcaagaggaattattttaagtcagtctaataaactaatttgaagttcattttaaagactatgaaatggaaagttgaaattaatgaccaatatgagtttgggagattgaataaattacttattataaaaattttacttatttattaaaattatagaataattgtattgttcttccatggatgattaagacctggttacaaatgtaatgatgcatttaccttccttataattttttagacccacctggcactcctgactacattgatgtcacccgggaaaccatcacacttaaatggaacccaccattgcgtgatggaggcagtaagattgtgggctatagcattgagaaacggcaaggaaatgaacgctgggtgagatgcaactttactgacgtcagtgaatgtcagtacacagttacaggactcagtcctggggatcgctatgagttcagaataattgcaagaaatgctgttggaactataagcccgccctcacagtcttctggcattattatgacaagagatgaaaatggtaagcatttacaacttatttccaatgagactaagagcattcacatttttaaaaaacacatttggcccctggcctgtaaaatggtaacagaaacaaattacccaaggttgctaagtggatgaattatgtctttctacctttcagatgaaaagaagaaaaaaataattggcatcaattattttttctattatttcactccattcccatataaagagcatgcagcaagtgggaatgagtttttagctttgtaattttcgccacttaacagtacataaagaaaaggttctcgagaataagtgtccatctttactgaagttattaaaatacaacatacatccaacaacacaatcatccccttgcttgaatgcagctgatggcctcttaaaagaacttgtgtgactgtgcagcagtattaggaagtacatgatctgtaaatgtttcactttcctttttacaaagagcaatgcaaaattaaaaacatgacaggcattacaaagggaataataataggcaaatatttaaccccatagtccaaattctcaattatcaatcctactttcaaaataggctttggtagcacagtagaagtcactactcttcctggccttgtgatatggcactactgaaaaatatatatttatgtatgtctttattaagccaaactaatacatagtatttctctttcttttatagttccaccaatagtagagtttggccctgaatactttgatggtctcattattaagtccggagagagccttagaattaaagctttggtacaaggaagaccagtgcctcgagtaacttggttcaaagatggagtggaaatcgaaaagaggatgaatatggaaataaccgacgtacttggatccaccagcctatttgttagagatgctactcgggaccatcgtggtgtatacacagtggaagccaaaaatgcatctggttctgcaaaagcagaaattaaagtgaaagtacaaggtacttttaaaatagcttcttaatgctacaatttatgaacttggattagagacatgcctagttgtattttaatggacaaggaaaaagaaactaactctagaaactttttcttatagatacaccaggaaaagtagttgggccaataagattcaccaatattactggggagaagatgactctgtggtgggatgccccactcaatgacggttgtgctcccataacccactacatcattgaaaaacgggaaaccagcagacttgcctgggcactaattgaggataaatgtgaagcccaaagttacactgccattaaactaataaacggcaatgaataccaattccgtgtttctgcagttaacaagtttggtgttggcaggccacttgattctgatccagtggttgctcaaatacaatatagtaagtttgcgtttttactaagcggtactatgtcaaaagtttaaccttccaagcaaatgcatctaattgatttggggttttgtttttgttttacagctgttcctgatgcccctggcattccagaacctagcaacataacaggcaacagcattaccctgacatgggcaaggccagaatcagatggtggcagtgaaattcaacagtatatccttgaaagaagagaaaagaaaagcacaagatgggtaaaagtgatcagcaaacgaccaatctctgaaacaagattcaaagtcactggtctgacagaaggcaatgagtatgaattccatgtcatggctgaaaatgctgcaggagttggacctgcaagtggcatctcaagactcattaaatgtagagagcccgtcaacccaccaggtcctcccacagtggtcaaagtaacagacacatcaaagacaactgtgagcttagaatggtccaaaccagtgtttgatggtggcatggaaataattgggtatattattgaaatgtgtaaggccgacttaggagactggcacaaggtgaatgcagaggcatgtgtgaaaacaagatatacagtcactgatctacaagcaggtgaagaatacaaattccgagttagtgctatcaatggtgctggaaaaggcgacagctgtgaagtgactggcacaattaaagcagttgaccggttaacagctcctgagttagacatagatgcaaacttcaaacagactcatgttgttagagctggggccagtattcgcctcttcattgcctaccaaggtagacctactcctacagctgtgtggagcaaaccagactctaaccttagccttcgggctgatatccatacaacagattccttcagcaccctcactgtggaaaactgcaacagaaatgatgcagggaaatatacccttactgtggaaaacaacagtggtagtaagtcaatcacattcaccgtgaaagtgctagacactccaggcccacctggcccaattaccttcaaagatgtgacccggggatctgctacattgatgtgggatgcccctcttcttgacggtggtgcccgaatccatcattatgtggtagagaaacgagaggcaagtcgccgtagttggcaggttatcagtgaaaaatgcactcgtcagatcttcaaggtcaatgacctggccgaaggtgttccgtactatttccgtgtttctgcagtaaatgagtatggtgttggtgagccctatgaaatgccagaaccaattgtagccacagaacagcctgctccacctaggagacttgatgttgttgatactagcaaatcctccgcagtcttagcttggcttaaacctgaccacgatggaggcagccggatcactggctacctgcttgaaatgagacaaaagggatctgacttctgggttgaagctggtcacaccaaacagctaactttcacagtagagcgtcttgttgagaaaactgaatatgaattccgtgtgaaggccaagaatgatgctggctatagtgaacccagagaagccttctcttctgtcatcattaaggagcctcaaatcgagcccactgctgacctcactggaattaccaatcagcttataacttgcaaagcaggaagcccatttaccattgacgtaccaatcagtggtcgtcctgcccccaaagtaacatggaaactggaagaaatgagacttaaagagacagatcgagtgagcattacaacaacaaaagacagaaccacactgactgtaaaggacagcatgagaggtgactctggaagatacttcttgaccctggaaaatacagctggtgttaaaacatttagcgtcacagttgtggtcattggaaggccaggtccagtaaccggccccattgaggtctcatctgtctcagctgaatcgtgtgtcctgtcatggggagaacctaaagatggaggaggcactgaaattactaattacatagttgaaaagcgtgaatcgggtacaacagcttggcagcttgtcaattccagtgtcaagcgcactcaaattaaagtcactcatctcacaaaatacatggaatattctttccgtgtcagttcagagaacagatttggtgtcagcaaacctctagaatcagcaccaataattgctgaacatccatttggtaagaaaaataaaaatcctatttcaaagtctctattattaaatgtttcccctgaattttataaaattgtattcatacttaatacctttgtttatatttagtcccaccaagcgctcctaccagacctgaggtctaccatgtgtctgccaatgccatgtctattcgttgggaagaaccctaccacgatggtggcagtaaaatcattggctactgggttgagaagaaagaacgtaatacaattctttgggtgaaagaaaacaaagtgccatgcttagagtgcaactacaaagtaactggtttagtagaaggactggaatatcagttcagaacttatgcactcaatgctgcaggtgttagcaaggccagcgaagcttcaagacctataatggctcaaaatccagttggtatgtatcacaatttaagggcatatttgtttattattactgattctagtagaactcagagtggtatattttaaccttatttttgcatcccttccagatgcaccaggcagaccagaggtgacagatgtcacaagatcaacagtatcactgatttggtctgccccagcgtatgatggaggcagcaaggttgtgggctacatcatagagcgtaagccagtcagtgaggtaggagatggtcgctggctgaagtgcaactacaccattgtatctgacaatttcttcaccgtgactgctctcagtgaaggagacacttatgagttccgtgtgttagccaagaatgcagcaggcgtaattagcaaagggtctgaatctacaggccctgtcacttgccgagatgaatacggtaggaaatagtcaacattctcctttttaaaattatctcaatttatgtgaaaataaactctcagatattcattcatatctgttttgcctactgacagctccacccaaagccgaactggatgcccgattacacggtgatctggttaccatcagagcaggttctgatcttgttctggatgctgcagttggtggcaaacctgaacccaaaattatctggaccaaaggagacaaggagctagatctctgtgaaaaagtctctttgcagtatactggcaaacgagcaactgctgtgatcaagttctgtgacagaagtgacagtggaaaatacactttaacagtgaaaaatgccagcgggaccaaggccgtgtctgtcatggtcaaagtgcttggtaagcatgtcaaatgttctcacatttatatagcattttccagtgtgggcagaaagaatgatcttcatcatggcttgtcattacacctgtttcagattcccctggcccatgtggaaagctcaccgtcagcagagtaacacaggagaagtgcactttagcctggagccttccgcaggaagacggaggagcagaaatcactcactacatcgtggaaagacgcgagactagcaggctcaactgggtgattgttgaaggcgaatgcccaaccctatcctatgtcgttaccaggctcatcaagaacaatgagtacatattccgagtgagggcagtaaacaaatatggccctggtgtgcctgttgaatcagagccaattgtagccagaaactcattcagtaagtattaacacttttaaataatttgacagttgaaatgtaatagaatcagggggagaagggagaagggcagtcttatcaatagtaattttgtgcaattctcatcatccttattttcataaacagctattccatcaccacccggcatacctgaagaagttgggactggcaaagagcatatcatcattcagtggacaaaacctgaatctgatggtggcaatgaaatcagcaactacctagtagacaaacgtgagaagaagagcctgcgctggacacgtgtcaacaaagactatgtggtgtatgataccaggctgaaggtgaccagcctgatggagggttgtgattaccagttccgggtgaccgcagtgaatgcagctggtaacagtgagcccagcgaagcttccaacttcatctcatgcagagaaccatcatgtgagctccaagaatcatacataaatacaatgctcctcaaaactatatgacagataattttccaacacacaatctctaagaatttttagaatttatgaatggtctagaaaagcacatgcttatttgcatgatcataaatatagcttaagtcagagaacattttaactattacatctgttaagttagcaattagaattgctaaaagttgtacagcattttccaattaatgaaaaaatattctatcaatatgaaaagaatctattttataaattttccttagagaaaaatgcattgtactgtaataactgaaaagaaaaatggcaaaactccttttaagaagaggtttagcaggaacatacagtttctagtggtttcataagttactgacaaagtaattgtgacaagagcttcaaaaataagtggcaaatccttttacagagtctgagcccaagaactataaaggaatagtcactgggactgaattggggaagctaaggaaaccaattcttgtattcattagaaatgtattggtggcaagtgatactaacccagtgaaagataagcaactaaagaaaagtccctaagaatgggtactttaagtaatgagcttagctaatagagaacacacagtaaagctggccaaagaagtagggaagaaatatctactttcctaaagcaatttaattcttaagataataatattaaattataatgtggcactctgtgctgtcctataatatcaggagcccagttaataaagattatcttggtgagtgtggacaagagcaataatgcctttgtgagtcttgaaaacaaaaaatacaaatctcaacatttccttatttgcctaatatctgcatctcactttttaaattccacagatacccctggaccaccttctgctccaagagttgtggataccaccaaacacagcattagtttggcatggaccaaacccatgtacgatggtggtactgacattgtaggatatgttctggaaatgcaagagaaggacactgatcagtggtaccgagtgcataccaatgccacaataagaaatactgaattcactgtgccagaccttaaaatgggccagaaatattccttcagagttgctgccgtgaacgtgaagggtatgagcgaatacagcgaatcaattgctgaaattgagcccgtggaaagaataggtatttatcacagaagcttttaggtgaattattttcttctcacacctgtccatgaattaattaaattttgtcattaactttccagaaataccagatcttgagcttgcagatgatctaaagaagactgtgaccatcagggctggggcctccttgcgcttgatggtgtctgtatctggaagaccacctcctgtcataacgtggagcaagcagggcattgaccttgcaagccgggcaattattgacaccactgagagctactcattgctaatagtggacaaagttaatcggtacgatgctggaaaatacacaattgaagctgaaaaccaatctggcaagaaatcagcaacagtccttgttaaagtctatggtaagcattttacttaaaattggctatacaatgagtagatcctctaaaacaatatagcttgacctatgattgatcacctctctagaaaggaactatgttgattatatttccccaagaaaaaaaaagctatcaggcaaataggaaatatgaatctttcattctgtttttcagatactcctggtccctgtccttcagtgaaagttaaggaagtatcaagagattctgtgactataacttgggaaattcccacgattgatggtggagctccagtcaacaattacatcgttgagaagcgtgaagctgctatgagagcattcaaaacagtaactaccaaatgcagcaagacactttacagaatttctggacttgtagaaggaaccatgtactatttcagagtgctgccagaaaatatttatggcattggagaaccttgtgaaacatctgatgcagtactggtctcagaagtgcctttggtgcctgcaaagctagaagtggtcgatgtcaccaaatccactgttacccttgcctgggaaaaaccactctacgatggtggtagccgactcactggatatgttctcgaggcctgcaaagctggcacagagagatggatgaaggttgtcaccttaaaacccacagtcctagagcacactgttacttccttaaatgaaggtgaacaatacttatttagaataagggcacaaaatgagaaaggtgtgtcagaaccaagagagactgtcacagccgtgactgtacaagacctcagaggtatgtaccaaatagccaaaaaaaaaaaaaaagtaaagtaaaatgaaaacattcagaattcgtaacaatttaccataaaaataatgcttaagaataaatgcctgatttctttcccatagtgttgccaacaatcgatctttctacaatgcctcagaagaccatccatgtcccagctggcagaccagtagagctggtgatacctattgctggccgtccacctcctgctgcttcctggttctttgctggttctaaactgagagaatcagagcgtgtcacagttgaaactcacactaaagtagctaaattaaccatccgtgaaaccactatcagagatactggagaatacacacttgaattgaagaatgttaccggaactacttcagaaaccattaaagttatcattcttggtaaggatgtgtgacaaagatacaagcaagttgatgttcagtcacccaattttgatttgaagtaaaaattaatttcctgtatttcttctctttcatagacaagcctggtccaccaacaggacctattaagattgatgaaattgatgctacatcaattaccatttcctgggaaccacctgaattggacggtggtgctccactgagtggttatgtggtagaacaacgtgacgctcatcgtccaggatggctgcccgtttctgaatcagtgactaggtccacgtttaagtttaccagactcaccgaaggaaatgagtatgtgttccgtgtggctgcaacaaaccgcttcgggattggctcttacttgcagtctgaggtcatagagtgtcgcagcagcatccgtaagtccacaggcccttccaccactctccccacctctgattctgaatgttaacaaaaaagaatttgtttttaatatgccctaatgtaaataaaaataggtcacaaaattaaccctgtggtctttctaaggtttctaaacctccttttctcaggtttctaaacctccttttctcagaggttttcaacacacttaggcttgattttttttttaatatcttcactcttatgaaagagaagaggagggagttaggaagaaaggaatggaaggaagaaaagagagaagggaaggaggaagagaggaaaggaaggaggactggcaatgttatagtgagaaaaaaatacagagtgcatgcttaataaatgtagaattgaagaaaatgaggaacagcaaggaaagtacaaaattaaacctcagcatcatgcaatatacccatgtaacaaactgcacatgtacccctgaagctaaaagtcaaaaatttttaataaaaataattaaataattaaatgatttaaattaaaatttacaaatagtacaaaagtgaaactattggaaaaatagtcatgtgccttatgtaccttttaaaataccaaccaaaacctaaggaaaacacaaatatatgagtcattgttttaacgtattcatattgccatatcgtgttaacctctgtcttgctgcaggtattcctggacccccagaaacattacagatatttgatgtttcccgtgatggcatgacacttacttggtacccaccagaggatgacggtggctcccaagtgactggatatattgtggagcgcaaagaagtgagagcagatcgatgggtccgtgtaaataaagtacctgtgacaatgacacggtaccgctccactggccttactgaaggcttagaatatgaacaccgtgtcacagccattaatgcaagagggtctgggaaaccaagtcgtccttccaaacccatcgttgccatggatccaattggtaaggacattttgtatcagtcaaattgattgagttacaatttatatgtgggaaaattcacctttttgaaatatatagttctatgacttttgaaaaatgtactgttttgtaatcaccaccacaatcaaaatgtggaatatttttattaccccgtaaagttcccttgtgtccgtttgtaatcagtcccttccccaccccagctgctagcgatttctggcaaataatttttaatattcttctctggagtcaatttccacttctttaagatgagattcataatatatgctttctatcacacttaaaattttaaaacaagttaatatttctggaagcactttaaaaactgctgataaatgtaagataataatagtgattacaaatgaagcacatttaagagaaaggaaagtgaaaaaatgttaagtatttttagctgataaaatgaataaaattttcttttttctttcttttgtttttttgtgtttttttgagacagagtctcactctgtcacccaggctggagtgcagtggcatgatcttggctcactgcaacctctgtctcccaggttcaagcaattcttctgcctcagcctcctgagtagctgggattacaggtgcctgccaccacgcatggctaatttttatgtttttagtagagacgcggtttcaccatgttggccaggctggtcttgaactaactcctgacctcaagtatctgcccaccttggcctcccaacttgctgtgattacaggcatgagccaccacacccagccatgaataaaattttcacaagacaaaaaaacaggctaatgttaacagtccgtttcaacaactcattgaatttgttaggtggcacagctaattttcaactttgcagcaactttaaccagtatattcttattcttattctcagctcctccaggaaagccacaaaacccaagagttactgatacaacaaggacatcagtctccctggcctggagtgttccagaagatgaaggaggatctaaagtcacaggctacttgattgaaatgcaaaaagtagatcaacatgaatggaccaagtgtaacaccactccaaccaagattcgagagtatactctaacacacctacctcagggtgcagaatacaggttccgcgtcctagcttgtaatgctggtggacctggtgagcctgctgaggtaccaggaacagtcaaagtcactgaaatgcttggtgagacatatgatcatttgctttctgcaataattgccatagacttatttcttagtccccctaccccaaatgctaaattgaaaccctacctttttttccagaatatcctgattatgaacttgatgaaagataccaagaaggtatctttgtaaggcaaggtggcgtcatcagacttaccataccaatcaaaggaaaaccattcccaatatgtaaatggaccaaggaaggccaggatattagtaagcgtgccatgattgcaacatctgaaacacacactgagcttgtgatcaaagaagcagacaggggtgattctggcacttatgacctggttctggaaaataaatgtggcaagaaggctgtctacatcaaggtcagggtgataggaagtcccaacagtccagaagggccactggaatatgatgacatccaagtccgctctgtgagggtcagctggagacctcctgctgatgatggtggtgctgacatcttaggctacatcctcgagagacgagaagtgcctaaagccgcctggtataccattgattccagagtccgaggtacatctctggtggtaaaaggcctcaaagagaatgtagaataccatttccgtgtttcagcagaaaaccagtttggcataagcaaacccttgaaatctgaggaaccagtcacaccaaaaacaccattgagtaagtgccctttcaaccacaaaattataaacattatttcagcacttttctgtttttaaatgaaagtcattggcttataatacttgggactgtattctaatacatgtgtgctttccacttatatttacagatcctccagaacctccaagcaatcctccagaagtactcgatgtaaccaagagttctgttagcttgtcctggtcccggcccaaagatgatggtggttctagagtcacaggctactacatcgaacgcaaagagacatccactgacaagtgggtcagacacaacaagactcagatcaccaccacaatgtacactgtcacagggcttgttcccgatgctgagtatcagttccgcatcatcgcacagaatgatgttggcctgagtgagaccagccctgcttctgaaccagttgtttgcaaagatccatttggtaaggaattcagaagaaggggttaaattaaagaagcaagccatgtttggtccttttatttcaccagtaaagctgactcccttttcattattttaaaatatttcagataaaccaagccaaccaggagaacttgagattctttcaatatccaaagatagtgtcactctacagtgggagaaacctgaatgtgatggtggtaaagaaattcttggatactgggttgaatatagacagtctggagacagtgcctggaagaagagcaataaggaacgtattaaggacaagcaattcacaataggaggtttgctggaagctactgagtatgaattcagggtttttgctgagaatgagactgggctgagcagacctcgcagaactgctatgtctataaagactaaactcacatgtaagtagcctttggttctctacttatgatttacaaactaaacaagttaaggctaattccccctctatactaagtagaaccctggaaagctttattggagagcaagtgttaagaaagaaaagcaagtacacacacaggaaatatgacaagttctacaggaaaccattccaagcacacaacctcagcagatgttagatggagtgaactgagcactttccttgagtaattccctctaatgcaatggtttctttttaaaaatatttcccaacaagatttgaaaggtcaacaattgtatgccacttcaatgaacctaagtaagggcaagaatactacagaattatagagagaatttacagtcccttaaaagcctatacattattaatccccttccaatcataaagagaaaaaaacactctacataaaatgtgacgatgtgctcattgaatccctatttaccatatgatcctaggaaaatcacttcaaagagtttttaagaattaggctaatatgtaaatcatggtatgtgtcagtaaataaggtaaattcattcctgatatacaaggacaaaggattacagattgagtattaacagtcacttaatattatctttcatattgttcagctggagaggccccaggaatacgcaaagaaatgaaggatgttaccacaaaattgggtgaagctgctcaactctcatgccagattgttggaaggcctcttcctgacattaaatggtacagatttggtaaagagctcatacaaagccggaaatacaaaatgtcttcagatggacgcacacacactcttacagtaatgacagaggaacaggaagatgaaggtgtttatacctgcatagccaccaatgaggttggagaagtagaaaccagtagtaagcttctcctgcaagcaacaccgcagttccatcctggttacccactgaaagagaaatattatggagctgtgggttccacacttcggcttcatgttatgtacattggtcgtccagtacctgccatgacttggttccatggtcagaaacttttgcaaaactcagaaaacattactattgaaaacactgagcactatactcatcttgtcatgaagaatgtccaacgtaagactcatgctgggaaatacaaagtccagctcagcaatgtttttggaacagttgatgccatccttgatgtggaaatacaaggtattttatttttattttcagtgctttttatttttaaagaaaaaaaaatctcaaaaacacactatgaaaaccaccacaattgtattttcccccaacagataaaccagacaaacctacaggaccaattgtgatcgaagctctattgaagaactccgcagtgatcagctggaaaccacccgcagatgacggaggctcctggatcaccaactatgtggtggaaaaatgtgaggccaaggagggggctgaatggcaattggtgtcttcagccatctcagtgacaacctgtagaattgtgaacctcacagaaaatgctggctattacttccgggtttcagctcagaacactttcggcatcagtgaccctctagaagtgtcctcagttgtgatcattaagagtccatttggtgagtacaacttgatttctgtatcttcctatggtaaagttccatctttgcataaaattcttttaaacagaaagaaattttgaaaggaaatagcaaagattcagataaagtacaagtgccttttctttcactttaattgaatgtttgcatatctaaaaggagaaatatatatcctaaccccattgtaaaaatagaactttggtttttgatatgtcttagtataaagtaaccaatttcatctttctggaatagctattttttaacaaaattttggactcatataacattcttttttaaaaaaataagctttaataaagctgcctgtttcatctcatgactcaaatcttttttttgtttaatagaaaagccaggtgctcctggcaaaccaactattactgctgtcacaaaagattcttgtgttgtggcctggaagccacctgccagtgatggaggtgcaaagattagaaattactaccttgagaagcgtgagaagaagcagaataaatggatttctgtgacaacagaagaaattcgagaaactgtcttttcagtgaaaaaccttattgaaggtcttgaatacgagtttcgtgtgaaatgtgaaaatctaggtggggaaagtgaatggagtgaaatatcagaacccatcactcccaaatctgatgtcccaattcaggcaccacactttaaagaggaactgagaaatctaaatgtcagatatcagagcaatgctaccttggtctgcaaagtgactggtcatccaaaacctatcgtcaaatggtacagacaaggcaaagaaatcattgcagatggattaaaatataggattcaagaatttaagggtggctaccaccagctcatcattgcaagtgtcacagatgatgatgccacagtttaccaagtcagagctaccaaccaagggggatctgtgtctggcactgcctccttggaagtggaaggtaaaaataaataaattatcatcaagttgaggctaaatgagttattaacttgggggtggaggctattgcacttaaacacatactgttagatgttgctaaattatattctttttttttttttttctgatacagttccagctaagatacacttacctaaaactcttgaaggcatgggagcagttcatgctctccgaggtgaagtggtcagcatcaagattcctttcagtggcaaaccagatcctgtgatcacctggcagaaaggacaagatctcattgacaataatggccactaccaagttattgtcacaagatccttcacatcacttgttttccccaatggggtagagagaaaagatgctggtttctatgtggtctgtgctaaaaacagatttggaattgatcagaagacagttgaactggatgtggctgatgttcctgacccacccagaggagtcaaagttagtgatgtctcacgagattctgtcaacttaacatggactgagccagcctctgatggtggcagcaaaatcaccaactacattgttgaaaaatgtgcaactactgcagaaagatggctccgtgtaggacaggcccgagaaacacgttataccgtgatcaacttatttggaaaaacaagttaccagttccgggtaatagctgaaaataaatttggtctgagcaagccttcagagccttcagaaccaaccataaccaaagaagataagaccagagctatgaactatgatgaagaggtagatgaaaccagggaagtctccatgactaaagcatctcactcttcaaccaaggaactctatgagaaatatatgattgctgaagatcttgggcgtggtgagtttggaattgtccatcgttgtgttgaaacatcctcaaagaagacatacatggccaaatttgttaaagtcaaagggactgatcaggttttggtaaagaaggaaatttccattctgaatattgctaggcatagaaacatcttacacctccatgaatcatttgaaagcatggaagaattagttatgatctttgagtttatatcaggacttgacatatttgagcgcattaacacaagtgcttttgaacttaatgaaagagaaattgtaagttatgttcaccaggtctgtgaagcacttcagtttttacacagtcataatattggacactttgacattagaccagaaaatatcatttaccaaaccagaagaagctctaccattaaaatcatagaatttggtcaagcccgtcagctgaaaccaggggacaacttcaggcttctattcactgccccagaatactatgcacctgaagtccaccagcatgatgttgtcagcacagccacagacatgtggtcacttggaacactggtatatgtgctattgagtggtatcaacccattcctggctgaaactaaccaacagatcattgagaatatcatgaatgctgaatatactttcgatgaggaagcattcaaagagattagcattgaagccatggattttgttgaccggttgttagtgaaagagaggaaatctcgcatgacagcatcggaggctctccagcacccatggttgaagcagaagatagaaagagtcagtactaaagttatcagaacattaaaacaccggcgttattaccacaccctgatcaagaaagacctcaacatggttgtgtcagcagcccggatctcctgtggtggtgcaattcgatctcagaagggagtgagtgttgctaaagttaaagtggcatccattgaaattggcccagtttctgggcagataatgcatgcagttggtgaagaaggaggacatgtcaaatatgtatgcaaaattgaaaattatgatcagtctacccaagtgacttggtactttggcgtccgacagctggagaacagtgagaaatacgaaatcacctacgaagatggagtggccatcctctatgtcaaagacattaccaaattagatgatggtacctacagatgcaaagtagtcaatgactatggtgaagacagttcttatgcagagctatttgttaaaggtgtgagagaagtctatgactattactgccgtagaaccatgaagaaaattaagcgcagaacagacacaatgagactcctggaaaggccaccagaatttaccctgcctctctataataagacagcttatgtaggtgaaaatgtccggtttggagtaactataactgtccacccagagcctcatgtaacatggtataaatcaggtcagaaaatcaaaccaggtgacaatgacaagaagtacacatttgagtcagacaagggtctttaccaattaacaatcaacagtgtcactacagatgatgacgctgaatatactgttgtggcaaggaacaaatatggtgaagacagctgtaaagcaaagctgacagtaaccctacacccacctccaacagatagtaccttaagacccatgttcaaaaggttactggcaaatgcagaatgccaagaaggccaaagtgtctgctttgagatcagagtgtctggcatccccccaccaacattaaaatgggagaaagatggtcagccactgtccctcgggcctaacattgaaattatccatgaaggcttggattattatgctctgcacatcagggacactttgcctgaagacacgggttattatagagtcacagccactaacacagctgggtccaccagctgccaggctcacctacaagtggaacgcctgaggtacaagaaacaggaattcaagagtaaggaggagcatgagcgacacgtacaaaaacaaattgacaaaaccctcagaatggctgaaattctttctggaactgaaagtgtaccactgacacaggtagctaaagaggctctgagagaagctgctgtcctttataaaccggctgtaagcaccaagactgtaaaaggggaattcagacttgagatagaagaaaagaaggaggagagaaaactccggatgccttatgatgtaccagagccacgcaagtataagcagactaccatagaagaagaccaacgcatcaagcagttcgtgcccatgtctgacatgaagtggtataaaaagatacgtgatcagtatgaaatgcctgggaaacttgacagagttgtacagaaacgacccaagcgcatccgcctttcaagatgggaacagttctatgtgatgcctcttccacgcattacagatcaatacagacctaaatggcgtattcctaaactgtcccaagatgatcttgagatagtgagaccagcccgccggcgtacaccttctcctgattatgacttttactaccgacctagaagacgttctcttggggacatctctgatgaagaattactcctccccattgatgactacttagcaatgaaaagaacagaggaagagaggctgcgtcttgaagaagagcttgagttaggtttttcagcttcacccccaagtcgaagccctccacactttgagctttctagcctacgttactcttcaccacaagctcatgtcaaggtggaggaaacaagaaaagacttcaggtattcaacctatcacatcccaacgaaggctgaagctagtacaagttatgcagaactgagggaacggcatgcccaggctgcgtacagacagccaaagcaacggcaaagaatcatggctgagagggaggatgaagagttgcttcgcccagttacgaccacccagcatctctcagaatacaaaagcgaacttgacttcatgtcaaaggaggaaaagtctagaaagaaatcaaggcgacaaagagaagtgacagaaataacagaaattgaggaagaatacgaaatctcaaaacatgctcaaagagaatcatcctcatctgcgtctagactactgagacgacggcgctccctgtctccaacttatattgagttaatgaggccagtgtctgagctgatccggtcacgtccacaaccggctgaggaatacgaagatgacacagaaagaaggtcacctactccagagagaactcgcccacgatcccccagccctgtgtctagtgagagatcactctcgagatttgagaggtctgcaagatttgatatcttttccaggtatgagtccatgaaagctgctttaaaaactcagaagacatcagaaaggaagtatgaagttttgagtcagcagcctttcacactggaccatgcccctcgaatcacactgagaatgcgctcgcacagggtaccatgtggccaaaatacacgttttattttaaatgttcagtctaagccaactgccgaggttaaatggtaccacaatggtgtggaactccaagaaagcagtaagattcattacaccaacacgagtggagtcctcaccctggaaattctggactgtcatactgatgacagtggaacctaccgtgctgtgtgcaccaactacaagggcgaagcttctgactatgcaacgttggacgtgacaggaggggattataccacctatgcttcccaacgcagagatgaagaggtccccagatctgttttccctgagctgacaagaacagaggcgtatgctgtttcatcatttaagaaaacatctgagatggaagcttcgtcttctgtcagggaagtgaaatcacagatgacggagacaagggaaagtctctcctcatatgaacactctgcatctgcagaaatgaaaagtgctgcattagaagaaaagtcactggaagaaaaatccacaaccagaaagatcaagacgactttggcagcaagaattctaacaaagccacggtccatgaccgtctacgagggcgagtctgcaaggttttcttgtgacaccgatggtgagccggtaccaactgtgacctggctgcgtaaaggacaagtgctaagtacttctgcccgccaccaagtgaccaccacaaagtacaaatcaacctttgagatctcttcagtccaggcttccgatgagggcaattacagcgtggtggtagaaaacagtgaagggaaacaagaagcagagttcactctgactattcaaaaggccagggtaactgaaaaggctgtgacatcaccaccaagagtcaaatccccagagcctcgggtgaaatccccagaagcagttaagtctccaaaacgagtgaaatctccagaaccttctcacccgaaagccgtatcacccacagagacaaaaccaacaccaacagagaaagttcagcacctcccagtctctgccccaccaaagattactcagttcctgaaagcagaagcttctaaagagattgcaaaactgacctgtgtggttgaaagcagtgtattaagggcaaaagaggtcacctggtataaagatggcaagaaactgaaggaaaatgggcatttccagtttcattattcagcagatggtacctatgagctcaaaatcaataacctcactgaatctgatcaaggagaatatgtttgtgagatttctggtgaaggtggaacgtctaaaaccaacttacaatttatggggcaagcctttaagagtatccatgagaaggtatcaaaaatatcagaaactaagaaatcagatcagaaaaccactgagtcaacagtaaccagaaaaactgaaccaaaagctcctgaaccaatttcctcaaaaccagtaattgttactgggttgcaggatacaactgtttcttcagacagtgttgctaaatttgcagttaaggctactggagaaccccggccaactgccatctggacaaaagatggaaaggtaaccagttcttaaatgtctctttcttttatcttctaaaatattttatcttctaaattcagcttcccaaaaaaagcttaaaatgaaatcactttttaaaacacaaatcatttgcattctacaggccattacacaaggaggtaaatataaactctctgaagacaagggagggttcttcttagaaattcataagactgatacttctgacagtggactttatacttgtacagtaaaaaattcagctggatctgtgtcctctagctgcaaattaacaataaaaggtaggttggcttttgtttttacccacatttcttcagaagataatattagggaaatattttcaaacatccccccttatatacacatacaagaaagtattaaaataaaattattttcctaattccagaatacaatttgtacaccaaagcagaaacacacatttgaagttagcatatgcttttctatgagcataaaaagcagttattaagtacctagttatatgtggtattatataagattccatagtgtcagcccctgctcccaggaatatttaagaataaagtcagtgaatatacaaaatggcactacttgcctaaaccttcacagttgctaattttccaaagcagtgcaaagttaattaaagaactatttctattttaccaattaaaattagtttgctttcatttcaatcttctgaaagataatttaatgttttggttactcaaaatctcccaaatccacttatctcctaaatccgttgactattcttttcaagacttttttccttaagtcatatgaatcatctttggctcagtttagtttaaggaatcattacagtgatctcaaaagtcacacatgataattttccaaaagtggaactgagaaagtattaggtattacctacattgcatgaagaagttgactttttttctttttatgtttttcacacgcagaatctagaagagtaaaaggtgggggtctctttctaattaagtttgccttacagaggtttcttttttagctataaaagatactgaggcacagaaagtctctacacaaaagacttctgaaattacacctcagaagaaagctgttgtccaagaggaaatttcccaaaaagccctaaggtctgaagaaattaagatgtcagaggcaaaatctcaagaaaagttagccctcaaagaggaagcttcaaaggttctgatttctgaagaagtcaagaaatcagcagcaacctccctggaaaaatccattgtccatgaggaaatcactaaaacatcacaggcatcagaagaagtcagaactcatgctgagattaaagcattttctactcagatgagcataaacgaaggtcaaagactggttttaaaagccaacattgctggtgccactgatgtgaaatgggtactgaatggcgtagagcttaccaactctgaggagtaccgatatggtgtctcaggcagcgatcagaccctaaccatcaagcaagccagtcacagagatgaaggaatcctcacctgcataagcaaaaccaaggaaggaatcgtcaagtgtcagtatgatttgacactgagcaaagaactctcagatgctccagccttcatctcacagcctagatctcaaaatattaatgaaggacaaaatgttctctttacttgtgaaatcagtggcgagccatcccctgaaatcgaatggtttaaaaacaacctgccagtaagtttaattatgaatatattattgaagaaaaactaaaataccatgtcttccacatctgaagaacttcaacatttcttttctttttcctttgtcttagatttctatttcttcaaatgtcagcataagccgctccagaaatgtatactcccttgaaatccgaaatgcatcagtcagcgacagtggaaagtacacaattaaggccaaaaatttccgtggccagtgttcagctacagcttccttaatggtccttcgtaagtatctcctcacccttcttccttacatgtttaaggcctttagatcgtttttttgcctctctttcaagcacagaaaactctaagaagccttattaaattccatgtgaaagagggacagccaactgatgtgaattcattcttgtagtcaaactttctttatagctacacagaaacttggatagattacatttcaaagtaaagctaccaactgccgtgtaacatttatttgcaggatgcacaatatgtcaattactttctatatgactaatcatttttctcctagtgattcctagcacctgcatgtaatgtaatgatagaaatataaggattcatgttttggagacattgagctagctcttgacaaatgtatgtatatatgtatttgcttatgcttcaacagcaaattgtttgggttatgctgctgtgtgtgtgttgaagtttccatttctgtaagtcagcgtcatatgtcatcaattaaccagatgtcattgatgttcactgtgtatctgctatgctccacagctctagttgaagaaccttccagagaggtagtattgagaacaagtggtgacacaagcttgcaaggaagcttctcgtctcagtcagtccaaatgtctgcctccaagcaggaggcctccttcagcagtttcagcagcagcagtgctagcagcatgactgagatgaaatttgcaagcatgtctgcccaaagcatgtcctccatgcaagagtcctttgtagaaatgagttccagcagctttatgggaatatctaatatgacacaactggaaagctcaactagtaaaatgcttaaagcaggcataagaggtgagcaataaaattactggtagaggtagacaagccaagtaacatggtgtagtctttagtacacacaattcagtagaaagcaaatctttatttttttcagtgattctaagaccttttttttgtcattgttccataaaggaattccgcctaaaattgaagctcttccatctgatatcagcattgatgaaggcaaagttctaacagtagcctgtgctttcacgggtgagcctaccccagaagtaacatggtcctgtggtggaagaaaaatccacagtcaagaacaggggaggttccacattgaaaacacagatgacctgacaaccctgatcatcatggacgtacagaaacaagatggtggactttataccctgagtttagggaatgaatttggatctgactctgccactgtgaatatacatattcgatccatttaagagggcctgtgcccttatactctacactcattcttaacttttcgcaaacgtttcacacggactaatctttctgaactgtaaatatttaaagaaaaaaaagtagttttgtatcaacctaaatgagtcaaagttcaaaaatattcatttcaatcttttcataattgttgacctaagaatataatacatttgctagtgacatgtacatactgtatatagccggattaacggttataaagttttgtaccatttattttatgacattttacaatgtaagttttgaaactaactgttggtaggagaaagtttcttatggaacgaataccctgctcaacatttaatcaatctttgtgcctcaacatactgttgatgtctaagtatgcctcagtgggttgagaaaatccccattgaagatgtcctgtccacctaaaagagaatgatgctgtgcatatcacttgatatgtgcaccaatacctactgaatcagaaatgtaaggcattggtgatgtttgcatttaccctcctgtaagcaacactttaacgtcttacattttctctgatgatgtcacacaaaattatcatgacaaatattaccagagcaaagtgtaacggccaacactttgttcgctcattttacgctgtctctgacataaggagtgcctgaatagcttggaaaagtaacatctcctggccatcccttcatttaaccaagctattcaagtattcctatgccagagcagtgccaactcttggaggtcccagagtgcagccaatgcctttgtgtggtagttctaaattttaattgcacctgaaaaacctgggcacctaagcaatgagccacagcaaaaagtaaagaacaacaacaaaataaagctgttgttaaattttaaacaatattactaattgcccaaaatgtcaatttgatgtagttcttttcatgcaagtataaattcaattgttagttataattgttggacctccttgagatagtaacaacaaaataaagcaagctatctgcacctcaaaatgtgtggctggttgttttctgtgaaattctggggtggggaagtatgcatcttcgtgtatcacaaaaacgatcatagatagataaggcaactcaagttcaaaacagcccatgctgatctaattaaactaaagagcttctgcacagcaaaagaaactaccatcagaatgaacaggcaacccacagaatgggagaaaatttttgcaatctactcatctgacaaagggctaatatccagaatctacaatgaactcaaacaaacgtgtaagaaaaaaacaaccccatcaacaagtgggcaaaggatacaaacagacacttctcaaaaaaagacatttatgcagccaaaatacacaagaaaaaatgctcatcatcactggccatcagagaaatgcaaatcaaaaccacaatgagataccatctcacaccagttagaatggcaatcattaaaaagtcaggaaacaacaggtgctggagaagatgtggagaaataggaacacttttacactgttggtgggactgtaaactagttcaaccattgtggaagtcagtgtggagattcctcaaggatctagaactagaaataccatttgacccagccatcccattactgggtatatacccaaaggactataaatcatgctgctataaacacacatgcacacgtatgtttattgcagctctattcacaatagcaaagacttggaaccaacccaaatgtccaacaatgatagactggattaagaaagtgtggcacatgtacaccatggaatactatgcagccataaaaaatgatgagttcatgtcctttgtaaggacatggatgaaattggaaatcatcattcgcagtaaactatcgcaagaacaaaaaaccaaacaccgcatattctcactcataggtgggaactgaacaatgagaacacatggacacaggaaggggaacatcacactctggggactgttgtggggttgggggaggcgggagggatagcattaggagatatacctaatgctaaatgacgagttaatgggtgcagcacaccagcatggcacatgtatacatatgtaactaacttgcacattgtgcacatgtaccctaaaacttaaagtataataataataaaataaaaaataaaaaaaaacagcccatgctaataagttcttttaagcaaatgtttaaattatcgttagatgtattcagcaattttgtttaaaaagcctagatatagttctcatggatatatttatccccaaaagtttatcttctaaatatatcaagaaaaatatttttaggagagctgattcaactcggaatcagctgtgattcaatatctttgatggattttgaacatctacaattcacaatcttttgtgctaaacaccacagggaacaatacaaagatgattaacacggtatagatactgtccctcaaagagcatagtgaacggaaaaggacaacttcagggaaaatgatcagttgtgaatctgagtccatattggctactgcagctccaaattgagacagaacaaataaaggacctcagaactaaagaactattttattcccaagtctagatcagttgttttaaaagcatggtagaatgacagtatatggaagactgacactattttaaatagtgtcattctactatgctttttaaacaactgatctagacttggtaataaaataatgccaaaaatatctgtatttgtccacttcaatttgttaatcataattataagcctatgatgttatttgcctaaattcacctccttaatgtaggtacaggtgaccaaagctgaagcaaatgtactgtcagttttcattctccagagaaaaatcctgggtcttcattaatttattcagcaagttttccgtcttaagtcagattccctaaaagcagagcctgagacggggattcttgtctcagaaattctttgagggattattactctcagggaaaaagggaatggggcagccagcagatagggcagaggaagcaag

SEQ ID NO: 781 - DNA, 21623 bp, Homo sapiens
aagtgttgggattacaggcttgagctaacatttcttttctggcctatttcttttattttttattttttatttttgttgttgttgttgttttgggtttttttgagacgcagtttccttcttgtcgcccaggctggagtgcgatagcgccgtctcggctcactgcgacctctgcctcccggattcaagtgattctcctgcctcagtctcccaagtagctgggattacaggagcccgcagccactccccgctaatctttttttatttttagtagagacgggttttcaccctgttggccaggctggtctcgaactcctgacctcaggtgatctgcccaatttggcctcccaaagtgctgggattacaggtgtgagccaccgcacccagtctgttccaaatttaaatatactttcccctttttgagagaaggaaatgtgtgcattgtggaattccaaaaacactgcttaagagatgtatgggagctgagggaacaggcagaaagagatgagtttagatcatcccagaggcagaaggagaagcagcagctggaaacaaacaggagaaagcctccatggtctttttgtttgtttgtttttgtttttgttttgagacagagtctcactctgtcacccaggctggagtacagtggcgccatcttggctcactgcaacctccgcttcctgggtttcatgtgattctctgcctcagcctcccaagtagctgggattacaggcgcccgccaccatgcccggctaatttttgtatttttaatagagatgaggtttcaccatcttggccaggctggtcttgaactcctgacctcgtgatccacccaccttggcctcccaaagtgctgggattacaggtgtgagccacctcacccagcctgaaactacttctaaattttaaaaagaactgtggatggctgggcgtggtggctcacacctgtaatcccagcactttgggaggccaaggctggtggatcacctgagatcagaagttcgagaccagcctggcctacatggtgaaaccctgtctctactaaaaacacaaaacattagccaggcatggtggtgggtgtctgtaatcccagctactgggaggctgaggcagaagaatcgcttgaacccgggagggggaggttgcaacaagctgagatcgtgccactgcactctagcctgggcaacaagaatgaaactctgtctcaaaaaaaaaaaaaaaaaaattgcgaggcaaggtgggggatgcctgtaatcccagctcagaagaatcgtttgaacctgggaggcagaggttgcagtgagccaagatcacgccaatgcactccagcctgggtaacagagcaagactctgtctcaaaacaaacaaacaaaagaaatagtttcagataatcttctgttttcttcttgcaaagaaatgacttcatcagaacttcttttagaagcttctaagtatcattgaaaaatagctctctcagtttttaaattttagatgcagatttttcctattgagtgcataaactagttactttaaaggcgccccattttagctattatagtctggggtcttcacgggttaagtgagaccatgtttctagatactgacagaaggtggcaccataagcattgtccacgaatccagctgccgtctctgcagatgcatgtctgctctagaagcacaagtgtccataatttagattttccttctgaatgaccaaaaatgcctaaggggaggaattttggtcactaaagaagaaaatggccaagcgcggtgactcacgcctgtaatcccagcactttggaaggccgaggcagggggatcacgaggtcaggagttcaagatcagcttggccaagatggtgaaaccccaactctactaaaaatacaaaaaattagcagggcatggtggcaggcgcctctaatcccagctacttagaaggctgaggcagagaactgcctgaactgaggaggcagaggttgcagtgagccgagatcatgccactgcactccagcctgggcgacagagcgagactctgtctcaaaaaaaaaaaaaaaaaaaaaaaaaagaagaagaagaagaatgtttagatttgtcagttgaaccaagtttcagaatatggccagttttaaagatgacactttctccttgaccaaatttcgaatgagagaaaaggctgcaaactgtaaaaagacaagcaaaacctcagacagaagtgaaaatcacaaatctgcagtcaacagaatctctagagaataaaaatggaaactcctacctttcagtggagcttcagttctaaccctatcaaattattagtgtgtaagtctcaatcttcaactaagctgggaggattcagatcccaagactggccttaccagagacccctgccagccccagtgaggtcgagtaaacaacagtcgtttgtgctggtaccaaggctccaactattgatgccactacttagtggcaatccctgaaggcctgcttcaggtcctatctgggttgccaaaatgtcaacctcaaataatgaaattcaggaaatatgattaagtatagagtttatttgagcccaaagcttgaggatggctccctgggcacatgcccctaggttgccctgaacatatgttcccattagcagcagtcacagtggggttttaaggaaaaggaagaggcagtccctaagttgttagcaagaatttgcattaaaataacagaaggtgctgattggctatgcatcgttcttagcatcactaattccatgtgaacaagaagataatgggtgaggcagcctgtcaggagcaaaaattccatcaaacaattgccctggacagttgcttctatggtggaagaggcgctgaatgaagtcccacactcctgcctctctgggcctgatcattctgcacacctcacagagctcagactaccctatttttcttttctcaggaaaaatgggtggatggtactggtggccctgcctggtctgatcatctaccctggttctagtaaccagattaattccttgtaatagagctgtggatttcagttcagttcccacgcacagaccttacctctgctttctccgaccacttctcccccaccccaggtacttcacagctgagagcctcttgccagcttccaactctccagcagtctttgttcccagaccgtgtcctgaggctgcactttctggacatgcccacctgctggactggcatctgtcttgtcacttctctggcctcacctctgcgaaaggaacacaaaagtcaggaccccagttcactctgtcaaaaggaaaagaatgagctgaaagctgagtcatgtaagcagctgcctttcctttcgttcctaagcagacggctacagatagaaggttcaacatccgcttctcttatgtaaagtgctgatttgctgaggagtgagctgtacacagtcgactgttcccaacctgcttcttttctcttgcaacgtgtggattaccacactgttccgctttcccctccagcccacttttcccctttaaatactgaagccctcaaagtcatctttggagaaaggcacagaccacagactgtttctgtgataccgtgttttttttcctcccaggcattgtccttaaccttggcaaaataaacttctaaattgattgagccctgtctcaagatactttttggtttaaacctctgaggccctactgtttctaatacaggtttccagtttgctcatctttcccaggtaggaagatgctctgttgccaagagaaatgcaattctaacacgcaaatccgcccaaacactagagctcagcattcagctctagccgagctaagaggatcccatggtcctgccccacagtctggggctcatcttgtggaggaggtaagtaaaataggccctgtctctctgacttctacctaatcagagttgatagttgcgttggaaattaggtaaatcgcaggtgagttgatgaatgtgggaaaccagatgaaaatggctgcttgatggggttaaaacgcaggagaggaatagaacccttccaacggaatggttccagccttgtgacatgaggagactgaaagggtatcccagaggcaggtcactggccttccagctccacctgtgggtggccttggccaggcaactgcaagagtgcagggccccggggaggtcgcacctggcaagcgctgagggagggtaaagcggagaggggtgtgagaagagaaaaacaacacagagcgtccgagctatgtgaggcgtgcgaggttaatccggcccggagagacaggtctatgcggcttcagcggtccccacccatgcctggcaattgtttaaaggcactattgctccggacccgctgccttcacccatgaacttcctttcctggaattatgatataaagaacaacgtacagccaattaatagcttgttattttcatgtaaattcttggtgagctatttaagaactgcccccctcttaagctttataaacccacttgtcactgttgcaaatcctatgttcagggcaacttgaagctatgctcccgggttgcaatcttcaaacttggcccaaataacctctctacttatatcaagtttgcctcagctttttttttcttctaggtcgacggttcccgccccgcaagggtgcagggaaggggacgcccgcacttcctagtgctcccttagctggggtcgagctgagcgccccccaccgagccccaggcggctctgtggagaagcccctcggccccgggttcggtctgcactgccagcccccagtccccggcgcgcaggatccagcagggccagcgccgggcgggcgagaaggcgagagagctagggccgggcggggagggcaccggcagggggcgcgggttcccaggaccgaaaaggcggagcctcccacgcgcactacgtgctccctacgcgcatgcgtcccgcccacgcgcaggcagcacctcgcctgactgggtagcgctgccacgtcggggcggggaagagcgtcgtcgcgtccgggtgacgtctcccgagggcgtcggcagggtcggcggcgtcggcagcagtgtcgacggcagcggcggcggcgggtgggaaatggcggagtatctggcctccatcttcggcaccgagaaagacaagtgagtgggagccccccgccgggggttgggcgcgatcggggcgcagggtggttgaggcggtgggagggcgaccggggaggcccaggcgggccggcgcggcggtggcgggggaggggcgcgcggcgggaaggagcggtggcccttccggccccttgcgcgccctccggagccgccgcctcgtgggccgcgcggcggaaaactggagcgggcagaatgaatggggtctcttttcggggcgccgcggccgagctttctccggccttggggtccggactggctgatcgcccgacgtccgggcctccgagtcgccgactcccggaagccgcctcgagccgcgctgaaagttgcctggagcatccgggccttttggacgtggacacgtttgttccaactttcggctgtgaatgtcctgtcgagcaagctctggtaccagcctcgccagtattcagtcgcttatctaacttagggtcctaagcgttggtgttttatccacttagccagcctcttgcctgtttaagcgaccgctgggccggcagtaaggagatatgacgagaaaaagtatggtggagactactggattaactatctaaccacaagagacgtgatccgctcttaacatacaggtgctcctggatttaccatgggattgcgttccgataaacccatcatgaatcgaaaatgcctttaataccccgataaacccatcatctaagttgaaaatttgtaagtcggtgactgttcttgaagacacaattctgatataaggaaaaagatgttttgattttttccttaaggttgcatgccttccctaatcaatcgttaggttaaaagcaaaacatttaatttcagctttaattgccaccttggcacgtactaatttccagtgagttggctgtagtttagactaaatggaatgttttcagacgtttgaaggataattcttactttgaaaacctaaagactcagcatctggcttaatctactctttagttatcttggcattcttcagtgccatacaaagttaacatgactttatgttttcaatgataaacccctaagtttgtcatagatgtttttaatgccacttttttcaaacgctatttaaaatgtttctcttttccaggatggagtctatcttgtaaaatgtcctcttcacacatggtagaatctcctgtgttgtttggatgaggaggctatatttctagcaaaattttaagccaaaatctaccagttatagtcactccagaaacatttagtgggggtcaactataggtcagtttctggagacttaaacatgggtaaaatttggatattatccttaaggaactcacggtatgatcttggcgaatgaatagaccagctctatcggaacaagagactcttctgagtttagggtgaagaactaacacatgtaggatcggggcatcattaatttctccttttcatatttgcatgtggcatgacttctgtcttgtaaaagtctatctccctatatttctgctataagcaaccacatttcaatctattgggctatactataaaggtcatggttttaattcagaaaagttgattatttaatctaggttacttgtgttttcttttcagggagacgtggggttttagcttccagggaacaggatcaactcctgaaaaatgaagctgatggttcatattaactttaattattatttaagctaagaataaaatatagatctctaccaattaaaaaatgtttagcttattatatgtttgaagttatagatgttttctagattcagggatatcctaatagcttgtctgtagtttaattgtgtggaataattggatattaattgttgaggcccagggcttgcccattctgaggtagtttttaaataagctttctttatttttagatgacttcctaaagatatgctattgtctaatcaagttaaataatctcaagacctgtaagtttgcaaatatatataatcactttcctctcctgataaatttggactttcccatctttattgctacctgataataaatcagtggctagtcagtcttcatggtccattagatttcactgaggttgaggcccttcaatcttaactctggattgactgtttaaaacataatggcacttggttaaaaaaaaattgaattttgaacaaagtctgtctggtaagatgtcctaattcatcagagatcggcttccctccctgacattgctggcacacaggcatgattgctggttccattggatatggatctggattgtcagcgtatttgaacagtattaagggagggttttgcagtagagacagaaggtgacgtaaggtggttcctaaggtgggttcggtcagtcccctaatagtttgttttcagtgtattgagaccaggagaattgatttacttcagacctattttttgaaactccctgttggtctggtgtcatgcgtttagagagactctgaacttcgttttctgttttccttagataatgatagcacttcatgagcaccatatgtgaagcacacatacgttctgtctgactctcagaacagtgccacattggcattgtcatcatttacagatgacatctgagagctagggtgacttgcccaagcccaagcagctggtagcagagttgggatcttaaccctcaccacaccggtgttttcaagagagaacttggtcgtggagaactggagaacagatactgcctaagttacatttagttttagactaatttaatactccatttaagaaacaaacagaacagctgtgcagttaggaaagtggaggggatttgaatgaggaggaggcgggttagagttagaaccgtctttgctgaacaagtagtgtgtttgcagaaagggaagttgaagttacgttgtcctaaaatacagcaaggaagaggaggtgcttaataccacggaaaaaagtctgtgtcatgtttctgtgaggttaaaagtaatttgatagtgtatgtcatgctgctgacatattccatgtgtttgatatcttcccagcaaaataatcagctctcattttcccttacagagtcaactgttcattttatttcaaaattggagcatgtcgtcatggagacaggtgctctcggttgcacaataaaccgacgtttagccaggtttgtttgcctttttttcatgtaaattataaaaacttcatgttcttttcaaagacagttaatttctacatattaagcaagtcattttttctctcgtagttgtattttccatttgtgttcataagtgtgttcttttatttaaataatagtgaggcaggtgatcgacttccagtggaaggtctgagaccaccactccttgtttttatcattagagaaactttaaaaatcagtttttgatgtttgtgtgttggctgtgcctgatatttgctgccctgccatcttccctaccccctctgatagacatgggtccagagggggtggccgtgccagccttgggttagcctcctccaggcaccagtggacacggagtgggctttctgctctttgctgtctccagacagtagaggtgatggagccaccttccaagttagcgtgattgtcaccaggcccatcatgctgctcgagcttctctggctgcgtcctcactttcacatccctagctgaggaaacagcgagtcgcatcacgtcatggaaacatgaaaaattaagctgaaaggtagaaaatgggccgtaaattgctcttagcgggtctgtttggttaattgaggagtgcctgttatcttgggcttagatccgctctgagttcagttcaatcaaaagttgtgagttttgatagttttatttttggttagttgaagaaaaggcaaaggttggtacactataaaggatcacttacggattaaagggagaaggcacctctaatcggagcagaaaacttgtgcccacgttgatgagaacatttgaaatttgaaaatcgatgcccaagtctttccagatggagggctggggaactccttccaacccacccttgaagtctaaatgtgcagcctctgagctgttgagtagctattatgcgtggtccctgggagctgccaggctctgcctttgagctcacatctgtctgtatacgttttcctgtaagcatttaagaaaatctaccactttgtgtaagtgagctgggagaaggaaacatgggttttttccggttgaagcccatggacgaccccacagcacacagtgtttttagaagggaagaggatgatggcttttccctccattatgctaattaccaagtggttagtataatagcagtctgtcttttgatagctctgaacatgagtttctttttacaaatttcaaaatcttggagaactagctttacattttctgtgtattgcaattgttttttctttaatgttttgatttatgaaccgaatctcccctaactaaaccagtggccatggattgtggtataaccaagcatcttaagtgaccacccagttctttgattttggggggtgtcccaagtgttgggctgagagaaatcaactgttccctattctaaaagttttctttaatctggctggaggcactttctttatgtttttctggatcatagattacctgagaatgtgaaatgtgaagttaatttaggcattccaggtcagtgctggggagagcccattggagctcgatggggtcagtagtatgtgtcagcttaagcatcctagtttgatgcgtgggtttgttttggttggttttaggcaatcctagccacccttggctttcccattagactgcattgcctctttacgttaagcttccttcattaaatagccactgccagaatacctgagtgagaccaactgaattttactgttgaataattgggctcagtttagcttttcatcagggttgtcatggtacggtcatttcagttcaaagctgagtcaagtcagctttgggaagcctcccaggcctgagttcagttgactcagggctgtacttggcggcttatggaagaaacggggccctgatgcaggtctgagtggttcagtgtggacagtttgtcagacctccctcttaggtggggtgggcttcccagctgcacacctttgactgaggaactcttcatacaaccactcccctttaaacagagctagaaatggagctggctggttttataaaaccaccacttacaaaactgcttcacgtggatattgttgagactaaacatttatttttctaaatcatgcgagtgattgctttagcttgtaaatctctagcataattcagggtgggtttctttataagctgcttacagtgatatggacgttaagattcatgtaatatattagcctactaacttaaacatggtttgttttttcagacaacttgattttaagaagaacggtacagtgtaaggtttcaagtctgcctgatccagtttaaagcacaagggctaaaaggattttttttccttaaaagaaggatcggaaaagagcaaatgttttaagctattgtattatgtaaacagagatcccaccaagaaagtgtaaatcagagccgggtgtccatgacagttgacagacctgtttggtgtgcctgttttgctaggagaccagagaacttgatgtactgcagacagctgagttacgcatttggttttgaaaaattatcttgtgtgaggaatatgattataacgtgaatttttccacatcttggtgtctgctagcttgaagtacaagaaaatattagtattctactatttatcttgcattaaaacactttaacattgaaaacgtgggactaatcaaaacaatacagtttcttcttggttgctggctgacttgacccaagtcactgctcaaactctgttttcataatatgatggttttggtgtactcttcagaagacaaatgtctgacttgcgggaaaaaaacaaacgtttagccatttgcaaacaaattgtctctttgcaattgtctaatatatgcacagcagccagtagaattcccctttttatttttttttccccgcagaccatcttgattcaaaacatctatcgtaatccccaaaacagtgcacagacggctgacggctcacactgtaagtcccacagttggagaaatttttttaaaacaatggtgttaaagagcccactcttaattgagacaaataatgttggcttctgagctgctgacatagagctgttgcaaacaggacaaggtgctggaactccttggcgcacacagcaagaacttgatacttggccacgttcaggaggcttatcccttctagggagggtcactggcccggccacctccattgattgacatttgtcatgagagcaggtccgtccatgtgaaacggatttcaacattttgagccattcattggtctttacagtgactgaacccctggcctttattaagttctttgtgtaaaattaaaactcttaggaatattaaggaatcaataaggtaagttgcccagtaagtgtgggttttatttcaccattataatttttcctccaggaagtggagatttcatgatatgtaacaattgtatttctctaatacagtaattttttccatcagtttatgtaagcattattctttccgagttcattaaaaattttctgccacatctaagaacattttggtgctagcctggcaaactatttgtgcttttacctgaattggaattttgaaaaggagagttttcacgttctgtaagcagaagtacaagatgggcatatcatgagacctccgttacaccgcagtgttagggattcaaggcagccgccaactgagaaaacgcctctgcttctccagaaaataacttgctctcttttcagcactgaatctcaactgaagcacttgccagaggcagccggttaagtgtttacctttaattttccataatataaagttgttgcgttttgtatttcagaccattgccctcttgaacatttaccgtaaccctcaaaactcttcccagtctgctgacggtttgcgctgtaagttcatacaagttccttccccggttccctgggcttgcgtgtcagagctcagtgtccactccatctggtctgccgtgctagtgtcaaggaccgcgtttcactagaggtggcaaggagctttcgtcccactgaccccatggaaacctcttttggagatttgaactcccaccgtgtgttaaaagggaaaaagtaactggaaagggtgccctttaaaacagtctagagctgggccgggcgcggtggctcacgcctgtaatcccagcactttgggaggccgaggcgggtggatcatgaggtcaggagttcaagaccaatctggccaacatggtgaaaccccatctctactaaagatacaaaaattagctgggcgtggtggcagatgcctgcaatcccagcttctagggaggctgaggcagagaatcgcttgaacccgggaggcggaggttgcagtgaactgagatcgtgccgctgcactccagcctgggcgacagagtgagactccgtctccaaaaaaaaaaaaaaaaacagtctggagctgctgctgccccttcttcctttactttggccgtcatcctagagggaatgtactggaattaaacgtcgagtcatattcttccctcttagagcaacaaaatttgaatgtttctctcactttctggaatttttaaaaagcaaactttttaagttattttttcagattttatttctcattagccttttttccttgaactccattttggagtgcaccctgtagttgtaagagcattgtgctgagagcgttccccaaatgagggtctgcagcttgcactgacccctgagttcctcacccaccagccccgtgccgacccgtctaacccgtgtgggggtgctccactcaaataggcccttggcagaaaagattgtccgttctgtccacacactgcctggatacagtctccagctctaggagatggaattggtttgctccatttagaaatagatcaaaactgggcattcagtagatggtaccaatatcttcctgtactgggaaatactaaatttagattgtgaatatttacctaatgataatttttagagaaggagatatcatagatgagtatgattgggaagttcagaaaactaaaatttgatttttacagccatccaactatagaatcattagaatttagtcatttatggataaattaaaatgaacacctggactcttgttaaaatcagaaagtccaaaccaaagataggcacttcccattcaccattctgttttaaagcagtaaaaattgaggtgcccttggatatccacaagcctaaattgagtacacccttgaaccagagcccctcagttaatggggtgaccgacatggggtagctgatcccagggggcattcccctctcgagctggccctgcactgggtggcctggggattgtgcttccttgcacagtggtgcacatttctatgtgtggatgagattttcttgtcaacttttcctgccaagacactaaatgcttttcagtgctaatactgacctgatagtagagatttctttccctgagtcggatggtagcaggatttacttggtaacccttggtttaaaatacctgtttttttgtttgtttgttttcttttgttttttaaggaaataagatcaataggcggagggaaattgtttctatatgcacttattaaataatttttgttaacaaccctgccctgggataaaagtgaatggaagtacatgactgagtaacagtaattaattctttgccctgatcgtttatttggggactgtatatgctttcttgactgacaatagaatgttgtattagttttcattgtgtctttatttgcagttcacagcacttttgttttgcatatgctacaaactaaaagtttagcaattacgttatattccaattctggagtccagattgtacaaattagatgaaattctaattcgtcattttaggaagaaatcaattacctaaaattactggctcttttcaacataccctttagtatgtaaaaaaataagcttcaaatgcgtgggttaaagttaactatcaatcccagtttaagaatgatatttctgtaagaaaactgctttattttccaagttgtagtatttaacataggctgagtcacaaataagtttttaattgtatcttaatgcagttgtctctgcctttcaagtcactttgattgaaacattttaagcagaacaaatatagccaataatttaaaataatcaccccaaaaccatttctcaaacctgctaaaactttgagcatgtgaataattttctcctcttcacattcttcttatgtgggaaggaagtgaatttgaaatattaaaatctgccctttggaataggctactttggccgtttataacttgatttctactcggggaggaaggtacattcccaatagctttccaattgggatatcctgtgatatgattggcaggctgtccgagtagttacacttaataaaatttgggttcgaaagcagattcctggaagttcaaaaataactaaaacagccccggataggttagaaagtgaacttaaatcattctcagaattagaaaataagaagttattttttatcttcaaagataaaaagggggccgggcacggtggctcacgcctgtaatcccagcactttggaaagccgaggcaagtggatcacgaggtcgagagattgagaccatcctggccaacatggtggaaccccgtctctactaaaactacaaaaattagccaagatcacgccattgcactccagcctggagacagtgagacgccgtctcaaaaaaaaaaaaaaaaaagataaaaagagttttgagcaagctcaaagacccgtgtgccagcagtcagatgcccacgttgggtgcacaggctaaggcagccggcccaatctggaaaccagtcaggcttttgccagcccctaatctagctgattggaacatgtttgttgatacaccagctctgtgatttctcaggtttagagaactctagaatttgatagagtgggccgggggcagtggctcatgcctgtaatctcagcactttgggaggctgaggtaagcagatcacgtgaggtcaggaggttgagaccagcctggccaacatggtgaaaccccgtctctactaaaaatacaaaaattagccaggcatggtggtgcgcgcctgtagtcccacctacttgggaggctgaggaaggagaattgcttgaacctaggaagtggaggttgcagtgagccaagatcacgccactgcactccagcctggagtggacagagactccatctcaaaagaaaaaaaaattaattaaatttgatagaatgatgatggggatagagtgtaaatttgccaaatttacccacgcaacagacatgattttacctaatacatgtgaattatgaagaataaactgatgaaaatagtttgggaatataaaacttaagaatacttgcgccgggcacggcggctcacacctgtaatcccagcactttgggaggccgaggcaggtggatcacgaggtcaggagttcaagactagcctggccaagatggtgaaaccccatctctattaaaaatacaaaaattagccgggcgtggttgtgggcgcctgtaatcccagctactcaggaggctgaggcagagaatcgcatgagcccaggaagcggaggttgcagtgagccgagattgcgccaccgcactccagcctgggcgacagagtgagactccgtctcaaaaaaaagaaaaaaaaaagaatgctttcatcagcaaaacattgtaacattccctttacttgagggcgtccacaataccgtaaggttgcgtgaactgtcctactgaatcttcatggttgcttggattttaatcacatcagaagaatttgagagcataccatggctggcagtccataaaagactagttaggaacatcagcttttaatcatcgaccctgctttcaggtttcattttaaacttatagaagaggggaagacatcagtgtgcttatttggcctttactctaaatcttaaaaggaagaaaattttaatatttcttagtttgagcccaggtgcggtgtctcacgcctgtaatcacagcactttgggaggccaaggcaggcggatcacttgaggtcaggagttcaagaccagcctgccaacgtggtgaaaccctgtctgtactaaaaattaaaaaaaaaaaaaaaaattagccgggcgtggtggcagtcgcctgtagtcccagcaactccagaggctgagacaggagaatcgcttgaaccccagaggtggaggttgcagtgagctgagatggtgccactgcactccagcctgggcgacagagccagactgcatcttgtgggtgtaaaaaaaaaatttgtagtttgagagtcaactttttcctcacagtttctgaaaatgtggcccttttgatgctgattaaagctggttgtgattttaacaccttagtagccagaatcgagactgtcatggggacatttaaaatctcaccacacttgacaccattcacaagtagccatgtggctcagtctcctgagtgctcctgcagagtgcagctctgccaggcttttctctagataatctcgtgtgtgttactgtagcagtttgagtttaaacacaagagttcactcggttaacatgttctaaccagcaagatttctgttgtttgcaggtgccgtgagcgatgtggagatgcaggaacactatgatgagttttttgaggtgagagaactgaactctgtgactgatagacctgttgatcttctgtatctgtttggaaggatttaaaatgtttctctgctaataaacatacatgagttatatctaatgacactttgtaatgtataacgagtcttaaaccactgtggtctcccttcaggaggtttttacagaaatggaggagaagtatggggaagtagaggagatgaacgtctgtgacaacctgggagaccacctggtggggaacgtgtacgtcaaggtaggagccagggcgagacggcggcgtggccgcttagtgtgccagggccaaggccaacaggcgaaagcgagacagtggtgcagccgcttagtgtgccggggccaaggccgacagaggatggggtgcctgtcgccatgcaccttgagatcctggatgctcaggcgcacagcagggctcaggtgcactggctcggcgcctaccagctgcgtcatatgtggcggtggccagcccacacgtgcgcccagccagcagaactgaaggacggaccgtacaccacagccatcgttatttcagtgtagaatatttagtacctgttggtttagaagctgtgtggactaaggaaaagttaggtttactcacatgtttggtttcttttttcttttttagtgaataaaactttatttgcctacacagccatatttgctcctttaaccagttgaatttgaaaaatgaaggcaacatttggcaaaatcttggactatcttgaagttaatctcattgaaaataaaggatttttcaattatcctgtaatactattccaccttactatacctgagtgtgtatatctctctctgatatacttggattggtaattgagaaagtcttattaaagcgtggatggcaagcacttctgtttttgtcttttcagtttcgccgtgaggaagatgcggaaaaggctgtgattgacttgaataaccgttggtttaatggacagccgatccacgccgagctgtcacccgtgacggacttcagagaagcctgctgccgtcagtatgagatggggtgagtgaggagtggccagtgacgtgactgagcacagttcggggccgtgtgcacacgaggtagtaaatgtctccttccaacccacccacagagaatgcacacgaggcggcttctgcaacttcatgcatttgaagcccatttccagagagctgcggcgggagctgtatggccgccgtcgcaagaagtgagtattcctgtgcccgttgttaagctcagtggcttctttctcccctcacaaccctcccccttccaaaaaaaaaattttggcataggtgtcgtttctgttttttaaaaggcagtgcttagaacatagtacatatttttaaatatccaaatgtcctctttggagaagaatattcacctgcacacaggtaacttcattatccaacttctcaagtagagatcagatcttagtaatcaagcaagagggcggttagctgggcagccgcggacatgaggctcgtggtgaaagtgggcatgcagtttattctcccagatattacgaagaagaagaatagatgttgtaacctcctttagatcagggatggcttccctgggacacattggaagaagaattgtcttgggtcacaaataaaatacactaatgatagctgataactttttttttaattgcaaaaaaaatctcataatgttttaagcaagttgatgaatttgtgttgggctgcaggttggacaagcttttgctttacatatttcacatgtccactggggtttcttttggttttgcttgttggttttagggcatttcattatgtcttgggatcgctggcatcctcccttcgggacactggcagaatcaggcccagcggtcacatctctctgatcctacatttaaatgtacgacaggtcacagagcagagaaaatcaagacgtcagaatcgaaccgattgagttctgagtctggagaggttctcatccctcttctgttaaacatggactagtaaatagatgggtggcgattgttttattgtcagcattcaagaagcataagagaaaaacaggcctgctctccccagcccaaaaacctgatggacacagtagctatgagcgcctgaagcgtggggtcagtgagggttgaagatggtatgtgtccagctcattttgattatgatttcctgtgaccatttgagttggttctagaagaagacagaagatgcaaggtattacacctgttcacttctaagttgcacatttttttctcctgaaacttttcacacctgaaatcagggtgtgtctcagtcacggcgtgcagtctcttcagcagtgtttttccttatcagtgccgttggcttgaggagctgcgcgtgttgagagagtgggtgtggttctgtgctgcgtgccgtggtttggatggcacggttttctttattttccttggttgcaggcatagatcaagatcccgatcccgggagcgtcgttctcggtctagagaccgtggtcgtggcggtggcggtggcggtggtggaggtggcggcggacgggagcgtgacaggaggcggtcgagagatcgtgaaagatctgggcgattctgagccatgccatttttaccttatgtctgctagaaagtgttgtagttgattgaccaaaccagttcataaggggaattttttttaaaaaacaacaaaaaaaaaaacatacaaagatgggtttctgaataaaatttgtagtgataacagtattcttggtgtaacttatttcttgtggaagttctttaaatttctttttctttataaatctgctagtcatcttggaggtaaagattaatatccatccaccactttgagtataaatgaaataatattttttatcttagggcatgaaataaaacacataccaggtgagatctacatgctaaataatccggaatttctcgaggctgtcatggaaagccttttggggtttcttttctaactggttagtgaagaagtgcttagctataatcagtagacacgctgtagactgcactgatgttgggaagaaggctgatctgtggtgagacacagtgggtgggcccgacccatgttaccttctcgttcctgcgagtttgtgtcaagaaccccatgtgttcgtgggagggagcgtggatgctcacacggcacactgagggccagtagtccgtgtccgtgtttccttatgccaatggctgtgggagacacagaagcctgcggtgcagatccgcctttagacactctggtattactttccccaagctactcgggtggcgcgtgctggtggtgtgactatggtgacagccagctgaccggtctggggcacctgccacaagtcagtgctgggggctgagcatttcattcctaagaccaaaacgttccaagtgaggccatcccaaaccatgcccacgtgtccacatacctcatcctcaaaaacctcctggctctaggtgggagtcacccaggctctcctgccctgctctgctccttgtgggggctcagtgacagatcctgctggtggagtaggggagtggctgggccctaactacacacccagtgaagattggcaggacatactacttgaccatctcatgaaagcccatttgtatgtgatgaagttcaagaaggtgatggtgtcgattcacctgggaggctgaagtgagctatgatcatgccactgcactccagcctgggcaacacagtgagaccttgtctcttagaaaaaaataggtttgtatactatagtagtgggcagataattttagatgggttggtggcagtgtttggcgatgtgggtggtgggcagaaattttagatgggttagtggcagtgtttggtgatgtgggtggtgggcaaatggtaattttagatgggttagtggcagtgtttggtgatgtgggtggtgggcaaatggtaattttagatgggttagtggcagtgtttggcgatgtgggccgtttcgtttatgtccttatactcgacatgtttccaaaaaaagtacaaactttttttttcttttaccttaactttggtcagtgatggccatttattaatttccactcagtctgaaggagggaagatggcaaaagttgtactttatatttcttaaccgctaagaatcagaaagcttatttaaaatatacatgactttgagaggctgaggcaggaggatcacttgagtctaggagttcaagacctgcctgagcagcaaacatagacccccatctcaacaaaaaataaaaaaattagctgggtgtggtggcacatgcctgtggtctcagctactcgggaggctgagatgggaggacccacccaagcctggtaagccgaggctgcagtgaggtgtgattgccactgtactccagcctgggcaacagagtgagaccctgtcccaaaaaaaaaaccagtaaatgataaaatgtgaatcaaaatgccataaaaagtgtcttcagacattgtagtaagaggagctcacagtcacacaggaagcctgtcaccctgctccccactcccccaccccagtgtgggtctatgatgcggttgaggtgggaaggtgagcatgaccctgagtgcccatgaggcactgctgcccctctggtgtgcgtggatcatggttgagaaagagcagcccagtgaaatgagtccaggcggtccaccagtggcagatagagttaagcttttatacaggtgctagggccaggcagattgtttttaaaaaggaagaatataa

SEQ ID NO: 782 - DNA, 807503 bp, Homo sapiens
tatagaaaaagtcacaattctaacagaagaagcataatggatagatgacagtgggaggtgggtgaagcctgcaattttgtctctccatgttgcttgaaagaaatctttttctacagtagtcatatattacttgtgtaattttaaaagacaaagaaaatgtatggggtgaaggaaggaataaactgatttttctcacctcgttaaatatgccttcacatatatttaaagcacatcagtcggaatgggtaccccttagcctacctatctcagattctgggaggtgttacctcaccttccttctctgtttcagaatcaatctgctgatgctggcagtcatactcctttctgtactgttttcagtaacagctcagtaatttgcctctattctccccttccctctccccattgcctctctctccttctttatggggtattcattccctgattttaaaattgccgaccatgcttttgtctttcccgctattcctatgttatttagtgaaagagaaaacatagtaaatgcacatggtacttgtagcttcaccctggtaatggcacatgtcacttctcacatttcattagctaaagcaagtcatatagccacttttacaatgggtaaaatggtatgtgccttcaaaaaaaagtatatatatgtgtatgtgtgtgtgtgtgtgtgtgtatacacagtaaaaaattgatggacagcatttgtgatgtgtgcatcttctcctccagacacctaggtcaaatatttatctttagactgtgttatctaaagtgatatacaaatttgatgatctcatgtccagtacttttcctttagtatttattttccttattttaattcactggcaaccaaaatgttaaatagaagcagtggtagtggtggctttgttctactcctgattttaacaaaaatgctaattattataaagaaggtttttatttttcatgatgttagtagttttcttgcaaatgacctatgttaagttacagaaacttctttctgtttttagtttattccatattttgggcctaaataaataaatcctttagtcaggattttggtcctaaataaatcatatgactttttccctttaagatattttatggtcaattatagtaatatattttctaattcaaatcagttttgcaaatcaaatcaaacttggtcaggagacttaatctttgtatacattccttgattcagcttgtctatgtttcatttagaatattttttgtatttatatatatgaatgcaattggccagtaatttttccttctcatatattcctgtctttcctaaatatcaatgttatattagcctcatcaaataagttgcgagaaagagaaaacaatataaattgggaaatagtccctcttattgctttaataagagggtaaagattggaattacattttcccagaatgtttggtataactaattacatcactatctggacccattgttttctttcagggaagaaatttaacaacagactgcttattcagtgaataaaatgatttgtgtttaatattttcattttttaaataatttattttcttgaagtataattgggatcaagcacacaaatcttgtgtataacttgatgaatttttttcaaatgtgaccccctgtgtaactgcaacccgtattaagatacagaatactattcaaggcactcctgcaggcttccctgaacccattcccatttgatcctctgccctaaagagagtattattctgacttctatcaccaaagattaactttgtctgtgtttgaacttcgtataaatggaatcaaacagcatgttcttgatatgtctggcttctttcactcaaaccatgtctgtgagatttatccacgttgttgcttgtaacagtagctcatttttcttccatcgtgttatattattgaattgtatgaatataccataatttattcatgcattctatagttgattgattgacatttgggttatttccaactctttcttcttagaatcagcttaggttggaaattgttttaggtatttgtctaatttgttcaagaattccagttaattgtcataaaattatctacaatattttgttatatttgtaatcacattgtatctgtagtttatgcctctatttttatatctaatattacttatacacccactgttttttatattgatcagttaggccagagttagtcaattttgatagtaaatccatgggtgccaaaatacccaggaataggggataccccttgtttcttctccattaatagagctaagcctcaagcacttgaaaaactaagctgattataggcttattatagtaagcttttccagactaatgagcagaacttgcttatagttgtctaactaaaatatcattttcttgactttttcaaaacaagaaaatcctgatgcaatgtgacttgatgtttttacaactagaaaaagaagttgctagttactctgtagtagcttgcaaaatgttcacaaattctttccgttcctgttagctgtgttcccctttgcagtgcgactttgccattcagtctttgataaggggagttgatttcaaaacccttgaatctgtgctaggtcacacgacttgctccagccaatggaacattagcaaatgtgatgtaagcagaggcttgaaaatactttcacattagggcctcccacgttatgttgctggaaaattttctgctgctatcagaatgagcctgcagtagactccaatgcctgtcaaaccaactgctaaatgagtgaggacgagtcagaccatccagccccagacaagcttatgcagaccagaactacctggtgaatccacagaaatgtcaagaaaggaaatagcccatggctacatatgtttaactagaggtgccctccatatacatctactttccttttaaaaaatctgtacttatttcccaggcacttataggggtgatggaactcttagtgtctaattcatttatcagatgcaccctcaggattgatagccctgaattgcaaaggttgagggatatgtgaatccattgtttgcctttgcaaataataggcagagtttcttaatgtggactagagttgctaatcttagattatccatttgagtcatgatttcctactatacaaagcaggagttgttatggggtagaagaatttttatcccaggaatgacaaagataagttgaagcactacagtaaaaaattagagttagacatggacacgtagaagggaacaacagactctacagactctaggacctacttgaggctgaagggtgggaggaggtggaagattgaaaaactacctatcaggtactgtgcttattacctggatgatgacataatctgtacatctaacccccatgacacacaatttacctatataacaaacctccaaatgtacccctgaacctaaaataaaagtttagaaaaaatgagaattagttcttggattcacaagatataaagagaagccagccattgaataccttgtttgaaagtaggttgacttcatgttttgtagcaggtctgaataatccatttgtctaattcactgtgctctataatacctattttcaaagatagtttcccaagttctgagaagtccttacatattagctgactttatactaaaatttgggtttaaaaaaatttttttttagagacatggtctcactctgtcatccaggttaaagtgcagtggtggtgtgataatagtttactgcagcctcgaaatcctgggctcaacaaccctcccacctcagcatcctaagtagctgggactacgagtgtgtgccaccatgcctggcttaaatttttttatttttatttttatttttattttttttttggagacgtgggatttcactatgttgcacagcatggtcttgaactcctggcttcaagcaatcctcccaccttggcctcccaaatccctaggaggcacaagcatgagccattgtgctttgccctaaaatttgttttaaattaaagtttttctggtaagaatgtaatagcgtattttgacaaagggtgagaaaggcttcttctggaagcaactaatgctaattgataaaattgatatataaatgggttgtggtttccagctctcttctgggagagaaataaaagggaatctaataaagaacaatgttggtttttctctggctgctttactaacaagaaacaccatgaaacatttctctcatttctaaacatttctataaaaaagataacttatagagaacaaaatcacaatcgaccagttatttcccaaacaaattttccatttttacaatacaaagggaaagctacaagtattagctgatttagaatatttctcatctaggatgagatgtcccagatggcagagtagagagagttttggatataattgaaactctatagaattggtggcaaatgtgcacatatacacacacacacacgttcctatccaattaagcagccaaaaagtcagcaatcccattgcttctttagtttaattaaagtcactgattttccaaacccaacatttagagatcacatcagatgctactcataatgtaaggaagcatgtattatggagaggttatcctgggtgaaaggtacagcaacaactgaatagtcaaccgaaacttctatcaatgggccaagctttgggagcatcaatatataaaagtttagaattccattttgtatcctcttctcccccaaaaagaaagagcactggaaattattccttgtgtggtgtttaatagtggtagatcattttgattaaggaattaaatggattgaggtgcatgagagcaagaaagaggaggggcaagaggggggattataggataaggtgtactgctactttaaaattatgtatgcatgatcccatccaggtccctcccactgcttgaggtaccagcggaaagcttgggcagctcagttccaagagggccaccaagcagaccacgctctgagcttcaggtaaccaagtgtttgctctgcagaatactttacctgggcacccaagtcttccttccagcattcctgctgctacagcctatttgctgagtaaccaggggttacagcagcgttgccaggcaacgagggacagcggtcctgttgaagagccatttgtcacactgaggggactggttgaaatgcaataaagaaatggtaactcagcttatttatcaatacaattacttgcacagtattagggatccatgtgtaacctacaaattcatagtcatatgaggaaacacagaaacattttgctaaatattaaagcataggacagacagatggtgttgggtttctaatcagctttactctgagcttaaagttgctgcacatgctgggataaggggaaaggcccaaagtcctttgccagctttattttgggcatctgtaagttagctctgggttacaatgtacagtgcatgtgtaaagaaaatctacaagattcttttccctgttaagtagagctggtaatgccattgctaattccctggggtgaagtaacaacacaaaattattgtatgtgtaatatattattaataattatatatatataaaacacacacatatattatataaatatttatgtataactggttataaatattactggttgtcctgtggacttataaagtgcttgatttgcccaatgcaatcaagagatttaccaaaaggatgagtattttactctgagcactgtgcttcaaaatgttttttgagaagttcagtagtgttgcttctaggagctcaaagtcctcaggcctgggatgagcttcagttttaaaggtgcagcagctttcccttgacgccctacgtttttgattcccagataccagcagctactcatgtcttcgccattgctaagaacgtcgttggtattaccttactctgagaacgtgtctgcagtttccagaaaatggagtatcgcaacatcacttaaagtaccctgcttcaaagtattgctggcaagtggcgtgggcctgattatttatttagaaatgctttatcaggaggagaatgcttttttgtaaacatgaattgcccagttctttcattgggctctggcttcttgtttcaggtcattgaaatgttgatctttgcctattttgcttcaatatccttgactgagtcacgaggtcttttcccaaggctggagaacgtgggagctttcaagaaagtttccatcgtgccaacccaagcagtatgtggactcccagaccgaagcactttttgtcacagctctgctgctgctgaaagtattcagttctgtacccagcggttttgtattcaggattgcccatacagatcttcacaccctacctacactgcccttttctcagcaggcctcagtagctgcatcacaccagacaagaatgatctgcatcctaacgcccatagcaattctgcaagttttatttttggaaatcacaagagctgcttttcttctcctccttctccaaagctgatggcatcatttaccttagctgtatggctgaaacctgagcaacaaggtgtaatgtaagtagtagtgtaggtataagctttcataggtccccaaaaccagtagtagtgaagatcatttcagcctgaattccaaaccggaagtgaaggctatatagaattcatggtattgaagactaactcttccagttgtttccccaattaaaatttttttctcttctatggatgaaatggaccatgaaaaaaaatgtgaaaatagtttatcaaaggcaaatgtgtttatgcaggaatcatttattttctatagcttagcgcgacctttggtcttagccttcaaagcctaaagaagactcagagtgagttttaaggcatggaaacttgtaattaatacaaataattaatattttcaaaatcttgaactgggtttatataatcaacatttccttactagggtataacattttcattaggcagatagttctcccagtccttgggactgttttcttcatcctcgtttccccaagaagagctgtttgtttgactcatggaagatgttcagtaatataaattgaatatataaataaccctccatctctaaaaacatatagcttttagttctttatcttgtggtattttcattttccaattagttaggaaatatgtaggtaagtgtgagagattctcaaaagctttcatgctgttcatcccagagaaatgccttcaatgagtctgggtcttattactgccattttttgttatttaatcaccagtttttcattctgtaatcttttctcaagctgatatctaatgagtttcttctaaatatttattgccaacctggagattttaatatacaggacagttttgaggaatttttgcttatcttttttcttcctagagggcttttggccctttctcttgtgacattttctgtgtgtgacagcgttggctggatatctaaaaacttgtgaaacaaaccagaaaaggattacaatctcataagcaaataggacttaaatgtttttggtgtttagtttcaatttgccaagtgaaagttggcatgtcttcattttgttttaaatttggattaatcacaaaattaatcacaaaccattcccatttctacatctctcctcaaagaaaaccttgttttcttactgtttgaaattctagtaaattcaagctactcagtttatataattaacatctgaagagtcttaaaacattgtcttttgacaaatagggctaagataaaatatccttctgagcttgtagggacatatctgtaccaaattcatcttctattgacatcattttgtataaataagacagagaagtatttacagggttggaagaacatggttaatggttttgagagttccttgtatcaaggtcgtttccattttcaaaattaaaatacctttgggaattgggggaatttcggggtgtttgcactagataagtaaaacaaacaaaacatggattatccaattattgtttattcaggagcagaataaatccagttcctaaatattttgctacctgccttcctctcacatttattatctaccaaagctagtatgtttacaagcaaacaaaatagcaaggaagataatcaataacatattaagaaatgcattttcagtaagcttgggaaaataagtctgcatttggtaaatacattcttgagtaatggtcgaattctcacttgtagatttaaacagaagaaaaatgaataggggcaaactcttttcaggttaagacctgatgggtagggataaaaacaaattcacttcagtaaattagaaatattcaactactgaagggttaaaaatataatttgcagtagaatttatataaaacttttatttctacttatataaaacctttatgtcatctaaatctatttgcctaaattaaaaatatacttgcactcataactttataccaaatatacatacaaaatatagtaaaattgtgacagtaaatgagggactattagtgttttacaatcttattcttacctcccaactcaggaaaaaaatagatgcaagtgatagatgcaagtgagaagaaattatgtgtgaaaaacatgccctttaaggaaagctttaaaccatctttagcagtaattcttgattggctcaattttatacatttgcctctctgatacttcctaccaaatttgatcacaaactcatcattttttgagagactactgtatcctaggtgtttgtgtgtgtatcctcagaatactcatgatctaaatgatctaatggagtgtacagatggatgagtgttattacctaggcagcacagtgtgttaagtgagcacaaagtgagacccctcaaccgaccctgagcaggaagaagggtgccaggaccaagcataatcattcagataccaaagctaagtaggaggtaaccaggtgaagaagagacctcaaggtctgaaaggtgtgtcactctaataagggtagagataacttaaaataatttgataactgccctgacacaagacctggaagttttctgaaaactcttctagtttttcaaaatcttatttcactgtgttctagaaggctgaaggacctttcacctcagatatttaacatgatctcagtacctcagttggactgtacggtcatggagaggtagccagtcatcttacagacactggctttggctttgtgccagttgatgatggggtgagtagagactatagctgtccattcttcatttcaccatgggaattaaatagagtgattctgacttcagggctaccaatttagagccttccatggacactaaatttgctttacattaaaaaaaaatttttgcactgatgacttaatactcaagcggcctgtagtgtgttgtaccacttcctctaaaagaaatagcaggagaactaatgagccaataacctaaatgttagttttgcagaatgattcaaccactttagtttccatcatgaatctctaatgaagggtgctgaggctctggggaatatattgtaaataagaattctattttttattgaaataaaggggcttcttcattggaataaagctttcattgaatataatgacattcaggcacttattcatagtacaccattttgagcaaagtttgaggtcattttaacaccactgtaactgcacaataccttagcatgtctttttggttggatgctgaccttttctctcttttccggttgcttcctaaggtgtgttatagaaaagacagtagatgggcagattgtgttcaaacttacaatatctgagaaagagaccatgttttattatcgcacagtaaatggtttgcaacctccaataaaagtaatgacactggggagaattcttgtgaagaaatggattcatcttagtgtgcaggtgagtaaaataaaaaatatttaacatttggttaaacacaaggatttgtcttcctttctctcttttaaatggcatctactcacaaaatctgcagcagtatcttttagatttcaggtgtgtataaatgacaactaaagaagaaaaatatttaaatgacctaatgatgtatctcttgatatactagcatttcctcccccaaaattgctgtaaaagctctcacagaaacttaaagacaatgctatctgtaattgtaatatcctcagaaaatttttgttttcttgggttcgtatattctattttgtttaaaaatgtgtaagggctcatttgatgtctggtactaattttactagtcatggatgtattaataccccagcttgatttttacatctgtctttctcagcagctgatgatgtgaataaaatttgtctgttgcattaaaatggtgaccttagaactaatgaactttacacttgaggcactcaaaaggtgttatattattattttagttgtcaaccacagtttgtatgagccttagaagctgctaaaggctgagagagctgtgacatgtctggtatttacagtctccagaagagaggcacagttcatccttttgttttttcagggcactggaatggcccaatacagttaaagccacacctgcctttcaaaccaggtgtattagtccattcttccactactataaaaaataccggagactgggtaatttattataaagaaaagaggttcaattggctcatggttctgtgggctatacaggaagcatgattctggcatctgctcagcttctggggagaccttagaaaacttacaatcacggcagcagacaaaggctgagcaagcacttcatgtggccagaatagggaggaaaagaaagaaagggaggtacttcacacttttaaaccaccagatctcatgagaattctatcaggagactagcactaggtggatggtgttaaagtactgatgagaaaacgtctacatgttccaataacctcccatcaggccccaccaccaaagctggggattacaattggacatgaggtttgggtggggacacagagccaaatcatgtaacttggggtgctgggtaccacagtttccagtatgagctctcatatgagcatccatccagtggctcatgtgaacctcatttgaactagaggacatttacatccttgttcattttataaaaattatctttgatttctcacttttttttttttttttaatcttgaagcagataatgagtgtgcgtcctcagagggtcttgataattgttcattgttttggctttcagatactaagatatgagtttagcaaatgtgattggcaggggtcagagttttcatacacaactagggttgaaatgatacacaaaggggacgtcatgtctgacgtcaagccttgtgcataggacatgatggtttctgattctcaatgcttattctccatgtgttcagtagttaacagataggagaccaatttgtcctagtcttgaagtttccattgtcttgaagtctccattctgcccactgaccagtcctacagaattgggttttaatattaaaaacgtagaaatagaaacttttaaagacagtgccatctttgcagaagatgccaaatagatatgtttgttgcatatttttgtatcaacaatgacaaaaaaattatctttacttgcctttattttgtgttatctgtgaaactgtgccatgttttggcaggcagtagtacattaaaagcttcacaaagaaagtttaaaatctaaatgcagagcggtaaccatgactgaattactcccttggggataaaatgctcttagagtgcctactgaaatcagcattatcatttcaatacatgtcaaatatgagtcatttactagtttaggcaaaatttcttcatgaatctttaaatctttctcttctttcaagaaaaggttaaagtacttatgatttaatgagactgctttatttcataactgtttgactatcaagagaaaacttgtccttttcgatttgtacactcttttatttatttttttgcataagttttaaactattctgcattttatattaaaactacagaactaggcagtcacaaaatgttagaaaaccattcagatctgtcatttaatcatctagcacttattaaatatttgaggggtatgcagcattatgggaatctggatttattcaaatgaaaattaaagagcaattatttactctaaaatggagctctatataaggttcctttatattggacaacagtctgaatatgtttaaggtattatgaaatttataaaaatccatattatagatttttttttgagacagagtttctcccttgttgcccaggctggagtgcaatggcatgatcttggctcactgcaacctccgtctcctgagttcaagagattatcctgcctcagcctcccaagtagctgagattacaggtgcctacaaccacactggctaattttttgtatttttagtagagaaggagtttcaccattgttggccaggctggtctcgaattcctgacctcaggtgatccacctgccttggcctcccaaagtgatggtattacaggcatgagccagagtgcccagcctagattttgaaaaaggaatgtactgattactcaaaagttgttataagaaataatggaggccaggcgcagtggttcatgcctgtaatcccagcattttgggaggtagaagtgaacggatagctcgaaccaggagttcgaggccagcctgggcaacatggcaaaacctcatctctacgaaaaaacaccctaaaaaaattagccaggtgtgatggtgcgtgtctgtagacccagctactcaggaggttggggctaaagtgaaaagatcacctaagcctggaagtcaaggcttcagtgacccatgatcatgccactgcattccagcctgggcgaaagagcaagatcctgtctgaaaaaaaaaaaaaaaaaaaaaaaaagtgacaggaaggacaggagattaggagttgggaaatctgatttaggttatgctactctgtagtcttaagaataaaatttataggaatccatatgatagttgtttaataaggaatgtactaattgcttaaacgttgttataagaagtaatggaagctgggcacagtggctcacacctataccctgcccgccttgacgtctcaaactgagtcatttgactcagttttcctatttacataagaagattgaactagatgaacaaaatgagggccttttgaattcttcataaacaagtaagtggagtgtggagtgtagcacaagtcattaaagtatggcaagctgttgagttgtgtagggttatttaggtagtaagtgacagagccagccccattaaccaatgatcagtcttgtgctttttttctcttctcccatgctgcttggcatttacataaaaacatttttttgctagattttctggacaaaatatagagaaatgtagattgttactattccattgtataactgcaagaacatttccagaaaaaatattttagtataaaatgtaacttactgttgcatgattatataatgcatctaaactccatttaatttggggattagggacttttatcatgctgggcataggacagaacaaatgattaataatcttgtttagtcaagtttcaaactacaaacctgcactttatgtatatgtggattttcacccatcttccaaatggccacaaattgatgaatttatatagtgtgtgtgtttctgtgcatgtgaaaaaataaaacatacaactctattcgtggaatggcccagaaaccagaattttagttcgttgcttatagtgattttttactggttagcttatacctggtggcataaaattaattagcagatctcaacttatgctttatctcagacagttcacttgtatcagctttccatcagtaaaatcagaattctaatttaccaaaatcagaaaaaaaattattttaaataattaaatatctgggggaaaagatgtcaggaaatccagacataccaaaattggaaatcgaatttcctaaacaaacaaatagacaatatgctcaatattgctatggtaatgaatctcacagcttttattccaaaactagcattttaaagtgtcaatctgttggaaaatgattagtgtttaaattaatattcatttatggacttgaatctgacaggattgccaattgaaattttactttggggtttaatatattggctatttcaaattatatcaagctaaaattcattgtgtcattttttatactaaaactagaaaaaatcaattcatagtttttattatcatatagggaacactgatcatattagcaaaatttttaaagcttagttttcatattaaatcagcacatgctgtagttataagatttcctttggttactcttataaaagttttgaaatatgtaaaaaaatttactttagcatttcgttatggattggtaggtaaaacaatatggaaataagtatatgtgtttagtggcatttcatttaaaagtaaaactttagggttttctttgacaatatattttgccttaagcagttccacacattttatagcccaaatagtgtcaaagaatcatcagtatagtcatccttctagtaattatgcagaattgcagtaaaacaattactacgatttgaagctgatgaaatactacagctgtggaaccaagaaatgatttagcattgggcttgttcacattttctatgctattttcagggctccttgatacattgacaattcaagagccatagatgactctagctacaatagtgtgaaaaagagcagttctaatatgatacaatgaagaaaaaaatgcatgggtaaataaagttttaggaatcaatatatgaaggataggagtttcataatcacagttcatgaagtatgctcttttgatttatgtattcaatctaagaaagaaaaactattgatagttctggaggaaaacaaaatgcaatttaaccaacatttgttagaatagataaaccaagtctctcaattaatctctgaactgtatgcccatgtgcacactttataaaggtgtttccatgttcctattgattgagggaacataaaacatccatgtcaccttatggaagcctcctcattcagttcagtaagctttatggcatagaattgtcataggaataccatcccagccccactcccattctaagagaatctcaacccatattatttctttaatatatcattgcatttagctctgactctgtgtgtgtgtgtatgtgtgtgtaagtatgcatgcatatgtgtgctaaatgtttctttgtgcaaagccttctctttatatctagccagctgggttaacagctcaagttagttgaatagttttgggttattcaaaataaattaagatcaatagaatataatgaagtttttcagaacaatcagttacaaattatcatagctgctattaatcattgatttatgtgcactatattaaacatgttacatatttgcagttatacaatgaaatagtgacatgcttgtaacatgtttaatatagtgttaataatagctctgtgccactgacttatattatctccatgacagagattttaaaaaattagccttaggaaatttaaactacctgcctacatttatagtcccaagcttctctgaccttaaactaaaagtaataacttgccatgaacatgggtcactgagcagatctaaataatagtttttaaaattctccaaaccaaaaaaaaaaggcacagaatcccaaaagaactgaaaacatatatttataatgtaaatataattttgtatatttatacatatttgtaatataaatattttcaatgcttcagatatttacatgatttatacaaataattaaagtcaatatattttttaactatacccctcattgatacaagcaatttaaatgtacaacagaatgtaattttgtataaagttctgcgcaatattttcatgttttatggcagttgcgatagactacaatggcttaaagaaagaatatttcccttaagccagcctgatcacctgacccatgccttatagaatcaacccttattacaataaaatacaaagaaggaagcacttcctactttattatggaagaggtaaaaccatccaagtaaaaaagtaattattctctgtacgttttttgcatgtgattttaaaatgcaatatttaagcagaaggcaaggctttaattcttgaccttttagtaaaaaattgtgcaaccctgggaaaactatgtaactcctcaaaatgttaggatacccattacaaattggaaacaaacaaacttggcctatttagcttacaccataaatttgaacatataaagaaaatattgtctactaaaacactttatagcctataacttcctgctatgaaggagcttacagtctcttcagaggataagcaatcaaataattacacaaataaaggcaaaattataattgtggtaagtgctacatgatcacatgaagaatgatttggtcaaaccactgaagtcaagaaaagcttccttgagtaaatgttattgaatatgtgtattagttttctaggcctgtactaaaaaattatcacaaactggtggcttaacacaacagttaattcattgttgaagagttctggaggctagaaagctgaaatcaagttgttagaagggccatgctctttctgaaacctctagaatccttccttgtctcttccagcatctggtgtttgcacagacaccagagtatgtgattgtgctacctcctggggtttgtctgcccacagcaaggccgggaacccagaaaagaaaagaggagtgcccagtgtagccaccacccactgcatgagaaacagagctggcagcaatccttgatgctccttagcttgtagctacatcactccagcctctgtctgcattatcatatggtcctctcctctgatcgtgtgtgtcttctcttcttataaggacatcagttgtactggattaggattcttcctaattcggtaggactcatcttaacaattacatccaaaaagacactacccaaataaggtcagagtcacaggcacatagggttagggcttcagtatgacttttgatgggacacagttcaactgatagtaagatttattcaaaagaatgcataggatccaactgggcaaagagaattgataagaacattccataaatgcatagcaaatagtgtaaatgcccttgtataaaaagaaatatgttacatagactaaaaaaccaaagtggttagagtgtcgctggcaaagtgggacatggtgtgaaatgaggacagaacagtaggaagaggctatgtgttaaagagaatcactggatatgttaagattttttttttaaatggaactctattgaactgttttatgtgaaggacaggagatgagggatgaggataaggaaggaaaacgtatgatatgcacagattattttttcctaaagatcactttggctgcagtgagggagaatggtttgcttgaagacaagtgtgaagggttgttatggtattttcatggaccaagtcagatgtaagtgttacttacttacagcatgaagacaatagtgaatatgcaaatgaatggtcagctttgagaggagtttaagaattaaattaaagggcttgttgatgaaggaatatgtaatatgagggaaagggagttgatgaatcccagctttctggcttatgtaattgcaggtacagtgatttctttttctcaaatagaaatactggaagagaatcagattttggatgtggagcacatatgaattagattccagtttagggtaataattctcaactatagaaattattagcattattgagaaactttaaaaaatattctgatgtccatatccctttatgtcttcattggtctaggtggggcgcaggcattatttctttctttcttccttccctgatggatttaaaaaggtgtaacaaaagaaaatatcagtctaccattgatgagcatttaggttggttccatatctttgctattgtgaacagtgctgcaacgaatatacatgtgcatgcgtctttatgatagaatgactcagattcctttggatatatacgcaggaatggaattgctgggtataatggtagttctgttttttttggtctttgaggaattgtcacactgttttctgtaatggttgaagtaatttacactcccaacatcagcctattaagcattcctttttctctgcaacctcactagcactgttgtttcttgactttttaataacagacattctgactgatgtgagatggtatctttcattgtggttttgattgacattgctctgatgatcagcgatcatatgcttgttggccacatgtatgtcttcttttgaaaagggtctatttatgtcctttgcccactttttaatagggttgtttttttcttgtagatttgttgaagtttgttatagaggccagctatcagacctttgccagatgtatagtttgcaaaacttttctctcactctataggttatctgttcactctgttgatagttcgttttgctgtgcagaagctctttaatttaatttgatcccatttgtcattgcttttggcatctctgtcgtgaaatctttgcctgttcctatttcctatgtccagaatgctattgcctagattgtctttcaggcttttagttttgggttttacgtttaagtctttattccaacttgagttgatttttatatatggtataaggaaggggtccagtttcaatcttctgcatatggctagccagttatcccaacatttattgaatagggagtcctttccccattgcttgtttttgtcagctttctcaaagatcagatggtggtaggtgtgatggccttatttctgggctctctattctttttcttcggtctatgtgtctgtttttgtaccagattcatgctgttttgcttactgtagccctgtagtatagtttgcagtcaagtaatgcaatgcctccacctttgttatttttgtgtaggattctctgtctatttgggctcatttttggttttatatgaatttaaaaagtttttttctagttattccaagaatgtcgttgtttgtttgatagaaatagcactgaatctgtaaattgctttgggcaatatggccattttaacgatattggtccttcctattcatgagcatggaatgtcacacaaaccaatgatatctgtttgtgtcatctctgatttatttgagcagtgctttgcatttctcattgtacagatctttcccctccctggttaactgtattcctggtattttattctttttgtggcgattgtttcacctgcttctaatcaaatctatttagtagctgttattaaactgtgtagccattagtatacagtagtactccattacccttggctttgctttctgttgtttgtcacccacagtcaaccacagtctgaaaatatcaaatggaaaatttcagaagtaaacaattcataagttttaaattgggtgctgttctgtgtagtgtgatgacatgtgaggtggtcaccatacctcctgcctgggaggtgaagcatccctttgtccagcagcttctccatattgtctatgctcctagcccttcagtcacatagtagctctcttagtaatcagatcagctgttgctgtatcacagttgtaacttgtgttcaaggaaactgtatttcacttcttaatggccccaaagtgcaataatagtaatgctggcaatttggctatgccaagaagccataaagtccctcttttaagtgaaaaggtaaacactctcaacttaacaaatgaaagagaaaagatcatatgctgaaattactaagaacttcagtgtaagaatgtatcttctgtccatgaaattctgaacaatgtattgttataattattctattttgatagttattgttaatctcttactgggcctaatttataaaaattaaactttatcttgggtatgtatgtataggaaaaaacatagcatatattgggttcagtaatatccacggtttcaggcattcactgggagtcttgcaacatatcctcaatggataaagggggactactgtatgcgcaatatatgtatacgcttaaaaagagttttgtttagctagtgtgtgtaagaagattatcacaagtcacactgtagtgtttgccttttgccagtctgaatgttatcatcagtctaatattttatagcaaagatttaagttcattgaaaacttccctatggaaacacttccaatcaagacctacagcaagccatgaataaattaacatttaaacatgaaaactgatatttgaagaagaattagcaattaataatttctgctagaaaatggtggtttctcagccaatagctataaattgtataatatatgtaaaaggaaatatatacaaatatcatatgggacatatatcacatatactactaaaattgaaaattgctataaatagaagactatgttccaatgtccactgatttttttttttttaacaatctctagtcttgaaaatgccactatggtaattctgtcaaatttgtaatggttgggatttgatggtagtgcttttgaaacctgtattatctaatggaattgtcatttatattatatcattttcacctaaaagccaaatacaataagacttaaattatttttgctttttttgtggatagtcatttttgtgcccaaagggctaactgatgccttcagttatacatgaacaattcgcactaacgtcaggaagaacagtgtgcatataacctagggcagaatttggtctatggaatgtatcactcagtagtggaatggagattatgactttatttaaacatggacttgagtagttttatttttccttactgtttcccttggcatttctttctctaaagtgcaacattcaaaagtattctatgcagctgtagtgtcctggatgcataataagggcatatgttcaaggcaagtttaaatatccacataagccaaagacagagtaattaacattaaaaaaattaagacaacttttccaagaatgaaaagctttaatagattagctaattttagaattatttaacaacaactgtgaaaaattattagtatttacaaatatgtatatataaatatatgtaatgtcttatgttagacagcaatttcattctgctctctaatgattacatgacatacttctgaaaaaagtcaaacagtgtgttctagaaggacaaagaaataattggttcagttttgcttatacttagtgttcaattgttatcaacctggggtgggaggaagggaaagaaagagggaaggacagaagagagcaagaaaagaaggaaggaggagaggaaggagagatggaagtcatgtgacatagctagggatttggggcaaaattcaagacccatgttttccttgatggaaagccaaggaacctgagaaggagagtcagcccatgccaatttcactgtggtagaggtgaccaagaaagtttacattatggatgtatagtaggtaattttaggttgtttttgtctgggatataaacccattgtgttattccagttatttggccaaaatgttccatgcaaccattttggagtgctagcactttagggaatttataaaaaggggtggtgttcagtgtctgggttgaatacaaggtaggtagaaaaggacaatcaaaggaattagctgcaaatgagatgaaatctatgggaacatatattgagaaaactagtgaccattataatttaatcctctgaaatacctgcaacaatctgagaacaaggtaggtggcaagatgcatttataaatattaaagaaacacaagaccccatacactttgaaaactggggagtaccgaacttggagaggtctagtataggtagtgcttgttggtttgcatatttttaaaaccactttattgaggtctgattgacatagaaaagtctgtccatgttgcatgtatgcaacttaatgagtctaaagataaatatatgcccatgaaagtatcaccataatctgtggcataaacatatccacctatttgtttattcttaattaaactttttcctgagataattgtaggttcacaggcacttgtgagaaataatacagaagtcccatgtaccctttactcatttgttctcatcagtaacatcttttataactatggtacaatattacgaccaggatatggacattaatataaccaatattattcacatttcccatttttcatatattcctatgtgtatatgtttagatccatatgattttattaaaattttatccaccacagccgagttgcagaaaagttccatccctacaaggacacctcaagctgcctttttataaccatgcccactgtctcccttcccctactgctgccacaggtgtccctaacttctggcaaccactcacttgtactctatttctaaaatttggtcttttcaaaatgttgtatacatgacatcacacaatatgtactcttttgggattgtttctttcttttttactcaacataattccgtggggattcattcaagttgttaagggcattgatagtccaccttattgcagcatagcattccacggtatgtgggtaccatggtttgtttaacccttcacccattgaaggacatctaggttaattctagttttgggttgtatcaaacacagttaaagcattcgtgtggatgtttttgttaacatacatattcgtttctctggaataaatgctcaagagtgcaatagcgtatggcagttgcatgtgtgtgttttaagaaactcatttccagagtggctgttccattttagaatcccaccagtgatgtatgagtgctccagattgtgcacatcctttgtagcatttaaaataaaggctacatttattttactatttaaaataacattttagccattctgatagataatatatcactgtggttttattttgcatttctttaatgactaatggtgttcagcatattttcatgtgcttatttaccattcatatgtccaattcggtgatgtctccccatgtcttctgcccattttctaatttgattgcttatttgtagcttgctgtttttattctttttacagggttttgctgagattgattaggtccaatttatcaatctttcctcttatgtattgtgttttccatgtcaagtctatgaagtcttgcctaaccctaaatcctgagtattttttctaaaagattttttttattttatattgttaaatttaagtatgtgtttcaggccaggcatggtggctcatgcctgtaatccccacacgtcaggatgctgaggtgggtgaattgcttgagcccaggacttcgagaccagcctgggcaccttgtctttacgaaaaattggctgggcatggtgctgtgtgtctgtagttccacctatgggggaggctgaggtgggagaatcagttgagctctggagtttgagaccagcctgggcaccttttctttacaaaacattggctgggcatggtgctgtgtgtctgtagttccacctatgggggaggctgaggtgggagaatcagttgagctctggagtttgagaccagcctgggcaacttggtgaaacctcgtctctactaaaaatacaaaaacaattagccaggcatagtggagtgcacctgtagtcccaactgctcaggagctgaggaaggaagatcacctgacctcaggaagttgaggctgctgtgagcagagatcatgccactgcactccagcctgggcaacagagtgagaccctgtcttaaaaaaaaaaaaaaaaaaaaagcctatgtttcactttgagttaatatttttttaaggtgtgagatttggttttgagcagtggatgtccaaatagcccttagttgaaaaggctatatccttccttcactgaattgctttggcacatttgtcaaaaattagtagaagatatttatgttgatttatttcagaattctatgtatatccttccaccaattccacatgttcttgagtactgtgagctataatatctagtagagcgactccttctactttatcctgctatttcaattacaaaaaataataaaccttttagggcctatgattttccatataaatttcacaataagcttgttgatgttttcaaaatatcttgtttagattttgataggaattgcattatatctatagatggatttggagtgatttgaaatcttttactatattgagtcctctaatatataaacatggtgtaagtatcaccatttaggtcctcttttattggcattttgtaatttttagcacatacattgtattagtctgttctcaccctgctataaagatactaccagagactgggtaatttataaagaaaagaggtttaattgacttggtttcacatggctggggaggcctcaggaaacttacaatcatggtggaaggtgaagggaaagcaaggaccttcctcacgtggcgtcaggagagagaagagtgaggtgtgaaggggaaagatccccttattaagccatcagatctcgtgagaactcactcactatcatgagaacagcatgtgggaaactgcccccatgatctaatcacctcccgccaggtgcctccctagacacgtggggattatggggattatacagttcaagatgatatttgggtggagacacagccaaactatatcatacatcctgcacctgttttgttgagcttacccataaagtgtttcattttctttttggtgattgtaattggttttgtgttttaaattttggcttctgcatgattattgttggtatatagcaatgttatgaattttctagggtgatcttgtatttcaaaactttgctgaactcacatttatagtagttctggaaattctttatttgttggaattttctacatagacaatcatgacatctgaatttggagcagtttttttaatctttccaatatgtagtttttatttctttttccttactgcagtgactagaatttttagtagtatgttgaataagaaaggtaagagcagagattcttgctcttcttgttcctaatcttaggaagaaaaagagttcaactttcaccattaagtatgatgttagctgtagattgtttgggtaagtgttctttatcaaattaatgaagttcctctctattcctaatttcttggagttttgagtattaaatattgtcacaaggcattttctgattcaattgatatgattatatgatttttcttctttagtctattaatgtggttgattacactgattgattttcaattgttgaaccaaccttacatacctgaaataaatcctacttggtcatagtatacaattatagtatatgtagtatacaattccttttatatagtgctgaattgatttgctcttctttctctagtttcttgaggtagaaacttaatgttttaagatccttcctcttttctcatataagtattagatttagcttagtgttgtaatttaatgtgtaatttaatttagtatttaatttagtttagtgcaataaatttccccttccacgctgctttagcagcatctgacatattttattatgttgtatgtttgactcttggacaaaatgagggcttggggtattgactcccgatggagttaaaaatttgcatttaacttttgaccaccccaaaatgtaactactaatagcctactgttgaatggaagccttaccaataagataaatggtccattaacacatattttgcatgttatatgttttacgtgctgtattcttataattaaatagagaaagaaaacattgttaagataattataaggaagataaatatatatttactattcattaagtgggagtggatcattatataagtcttcatgctcattattttcacattgagtaggctgaggaggaggagaaagaagggttggccttgttgtctcaggtggcaaaggcagaagaaaatttgtatataagtgaatctgtgtagttcaaacctgtgttgttcaaaggtcagctatattttcatgtgcattcagttctatgtttttgaaatttcctttgaggttttcaaaattttcttttacaactttctttttgactcatgggttatatagagatgtattgtttagtttcaaataaattggagattttaaatattataattctgttattgatttcaaatttgaatcattttcaatcagagaacacattcagtgtgaattcagttctttaacatttgttcaggattttttaacaggccagaatgtagtctatcttggtgaaagtttcacaagtatttgaaattaatgtgtatagtttgttttgtgtttacacacgcacacaaacacagatgcatacacatataaatcttctgttatctttttatttctatttaaagaacttcttttagtcattatttaagagtaggtgtgaagaaaaccaattctcttataaatagaactaagtacatctactttgtatacttttcttgagtgattctatattgtaatgatgtcctttttactagttctatcaattgctgagagtttgctgttgacgtccctgatttaattgtgggcttatctatttctcctttcagctgtatcagtcttgcttcatgcatgttaaagttctgttgttaggtgcatacatgtttaggatcattaggtctttctagtggagatatcattttatcattatgtaatgtccctcttaacctctagatatttggtttgttctgaaatctatgctatttgatagttactagttattccttttttcttttgattaatgtttgcagatatatttttctgattactaatttcaactgacctgtgttgatgtccatgaagtgaatgttgtacagatagcatattttttggatacttttttaaaaattaagtttatattctaatacactctgctaatctctgtcatttatttgtatatttagaccatttacatctgagattcttactgatatgctagccttatgtgtgcaattttattttttctatttcttgtctgttgtgggtctctgcatttctcttttctgaccttgctgtaggttacgtgaacacattttaggattctatcttggtgttttaacagcattttgggtatatcttttttgtatagtgtttttagtggctctaggtattaaagtatatgtaagtcacttatctactgacatggacatattactacttccattaaagtgtacttttatttccacttaggtcctttactcattctaccttttcagtataattgtcttaagtgtttcccctacatacagtgagcatcacattacactgagttgtaatttttgcttcaaccgtgaaatattatctagcaaactaataagagggaaagtctaacttatttccccctaattttattcattctgatattcttattttctttataagttctgaagcttttattatcattttgtttctatttaaagaacttcctttagtcatcctttaagaatgggtttgatgaaaacaaatactcttatttttcactcatctgagagtgtcttgatttttccttcattccgaaaggatatttttgctggatataaaatttatgattgacagttaattgctttcattacttgataaatgttgtgccactccttctggcttctaatttttcagatgagaaatctgttgtcatttgaactggtatttacttataagttttacatcattcctctggctgctttcaaggttttctctttgcttgttttgtatttagcagtttaatagtgaaagccctagcatgagtttccttggttttatcctattgtatgagatttgctcagcttcttgcatgtgtttgttaatgtcttttgccatattttcagtattttcagacattctttcttgaatacattttcactgccattctctcctcttattctaggattccagttatacaaatgttaactcttttgtttttaactcactggttcttgaagctctcttcaagtttttttttttccttttaatctctcttttcttatttgttcaaattaggtaaattcttttgatttccttcaggttcaggaatcctgtcatcttcctgttacccttgaacccatatagcaagtttgagtttgtttcaatggttgtatgtttcagttatttagtttccgtttggatcttttatatatatatatatatatataacttctatttctatgctggggtttctctcattttttttcttgcttgaaagaattcacaattgcttgttgatgcatttttattgtatctggtttaaaatccttgcctgataattccaacatatgattcatatcactgatggcatctgttgatcttcttctttcattcaagttgttattttgatggttcttagtatgacaagtgatttttattatatcctggatgttttgggtatcgtagtatgagactctggatccaaattcatcttctttttttattcagaagctgtccttacattgaggtgtgcacagaggccaggtgggtgtgtatgttcattcatcaccccgttgtcactgccaacatcatccagcagaagtggagcactgactcacactgcagcagatgggtagggtgaaacttcagcttccctgttgaccccttcccagtgaaagcgggccgcctattgctgctgccttgttgcccctcatggtgacatattcctaactccccactgagccacggaagggaaaaattcattgcttgttcacactactttgttgctgcagggtaggggtggaagctgagcttcctgctggtctctgtgacaccaggggaggtggggaatggagtgtcaagtaaccctcctcctatcaccttattctgcctcattgatgccaggtgtgagagaaggttctgcttctctccagaactctcccagttcttgtgaactgggtccaattcacaagaaagggaaaaaggatgtagagtattgattggccctaacacctagcacacagtctcactaataccactgggagtaggggctcagctcccctctaggccctgctcacttagtgagggtggggtgggaacagaatggagactaaccctgacacacaccacctcatgtggtcttgtgctgtgaagagagtggagaggttcattccctccttggtcccactgacaccagaggttggagtaaagtaaagtgctgatgagccctgactctcgtgtccttgtttagtcttgttaatattgggtggatgttgagcttcagctcctgactggggccctgccagagccggggggaatgtaatgtgctgactagtcctgccttgcaccacttcactaagtcttgctgctaccaggtaggggtggtggagatggtttagctacttgctgggctgaggtgacactaacttagtaaagagttggagcatggctgactcctttcagacaggggatgaaagatcagccctctgctcactctgccaatactatttagaaaagagaatcagagtggcacaacttccactgagcagaggacagaaaataagctccttatttggtctcatcaaaaccacccctacctacagttagacagctgcctgtttcaacaagtggagaatggaagatcagctctctgtttggtttattggaaccaccaggcaaggggaattggaacactgactgcttctgccagtgggaatagaaggttagctgcctcttggccctgtcaacaccactgtgaaagggaatcaaaaactactgcttacttctgttgggtgagagggtggggtgaaagattagctccctgatgagctcggctgctggaactatgaatgtgtgtgagtgtgtgtggggagagagtgtgtgtgtgtgtatgggtgtgcttgtgtgtgtgtgtttggtttttccattggagtttggctaaagtatgacaggtactttttgctaaaaaggttttctcttgtaggccaacattttcctgatcttctgtctaggaaaataagcctttccttggagcttattttgtctgtgcctgttggtggttctacgttagatgtttctggatattaaaacaacaacgaaaactagggaatttgccatgttgttcctcaagtcctcagattcctaattttttttcttctacctacttcgcaaagtcatcttacacttatttgttttgttatgttcagggctttttaattatagaaagagaactgggaggaataaggctgctccatctctgtcaggatcagaagtcatgtagtgttataaaaaggactttgtctaccattttaaaatagctgttggctgtaagctccttattgtatttaaagtatattggctaaaattgtgggaggtaaggaaaactctttgtaaagtgaactgacatggtgaaaagagagagaagatatgcttgtcaaatattgcgaagtctattcagatcaagctagacatggtctgtattagtcagggttctccagaagaaaagaaccaataggaggtgcatgtctgtgtgtgtatgaaaaggaatgtattagggagaatttgctcacatcattataaaggcaatgtcccacgacaggctgtcagcaagctatagaatgatagaagccactagtatgtctcccaaggaaggtgatactatgtctcagtccaagtcccaaagcttcaaaaccagggaagctgacagtgcatcccatagtctaaggctgaaagcctgagaacccccagatcccccagagaccactgctgcaagtttcagggtccaaaggctaaagaacctagagtctgatgtctaaaggcaggaggaagaaagggcattctgcactggaagagaaagagagaggcagctcacaaagcaagaaaagcctgcaagctgaatatcccccttcttctgtctgctttactgtagacacacctgcagctgattggatggtacccacctacattgagggtaggtctttctctcagtccactggcttatatgtcaatctcctctggaaacaccgcaatagatacatcaagaaacagtgctttaccagccatctaggtatccctcaatccagtcaaattaatattaaccatcacatggcctattcacaatttaaaaatgtagcataaattgcagcagtggtcaagtgtattggcaagttgtaaagtgcctataagaaacctatacacgagcatttgcagattcccttaacacttttcagcaaatattttgttacaattgaaattaaaaggcagtttgaaattgttcctctactaaatatcacactggatatgaataaaataactagatagactaacaaggtacatactttattgcctgtgattattgcaactaccactcctggtggagagccattcttctcaggtgtgcaagtggaagattaattctcaatcaggaatatagatttgatacaaggaaagcatttcacttggcattagtgtgtcaacatttcagctaatttgcctaaccacaaatacttcagggggaagagaaattgctagtgctttatattaaacattggatggagctggcggagataatacaatttgtactttttttacatagtttcaacgaattttggcagatatgtctttttgaggcaactttagatgttgaaaagctgcttgtggatattcaagacttgtctttttttcatgttacaatgaccatcaccatagtttgtatctgattttttttgtgtgaattgaggaatgtggagtcataatgcaaaagtcattgccataattctttgcagatcttatgactggaaattcttgtgtatgtagtttgatattcatttgtaacacatgtaactggttcgtgtaatgattaaaataataagtaatgcttgatcatggttaaaataaataccaaggataaattcttctattaattagtgtaagcttatcctaattaacatctttaattatgggctgttgttaatttttgtcgcaacctattagatatactgtcctaaatcattaacactagtgtaactgagcataaactctaggtgactcacggctacagtggaagcgcccatggaaaatatatatttctaagtacacagtttagataatttcaagcagaatcagaaaattcttgatgaattctaaatttagtataaacagaaatgtattaggtttggttattgagccaagcttcaaacattgaatatcagaattgtgtccatttgcaatgagtaagcatttgattcaagatttttttttgtactcagactcatttttgtatatctttctgtttaagtcatattgtatttactgcgattacagattttttacatatttcttaaactggttctatgttatgccattatataacaggtgataaggaatgtactgtcactgccccttgacaatgaaaaggggacatctctactagtgtatgtgtatgtagctgtggaggagttgaaacagtgtaagtgaaatgcctagaaattgtcctgagttttgattttgtttgtgcttacatttttattagtatatgtactttcttgaatagataattgatttggggcaatatttctcaatcttggcactactgacattttggactggataattattggttgtgcctggctttcctgtgcattgtaggatgttcagaagaatctctggtctctacccactagatgccagtagcaaacctgccacctctctgcctacttccgtcctgtcttgcaatagtcaaaaatgtctgcagacattgccaagtgtcccctaaggggcatgagccttggtggagagaaacttctttacagtctcatccttggcgatgtcatttccttataatttgcgtagttaaacatttttgttttgaggagcataagttgtgataccatacctgtacagaagaggcttggatttaaggttaaccacatttaactgagagaattttatcaaagcatgaaataagaaaaataggggcaaaaaatgaaattctaaaatggcttatgcaatttctaagggtagctaataagaattctgaattggtgacattgtttttaaaaaaagtaaagcattaaaagaatttcaaagataaaatatattttttggagtgtgaacactgtaattaaggagacccaataatgttaagttacttaaaggatgtatttttacttaaagtaggatacaagttggagaaattaacattcggttgattgttaaatattttgattcaaagaaagaacatagaattgtcagcctcaaaaaatatgcttaagatagaaaaataattttggttgcatgaaaagaaaaagattttagtaaattgttgacttgaaaaggggaactatttgacagaagtctcaacagtgttttggagtggcatagtgattggggggtgacatcagatgattagagttaaaaacgactggaccggctgggcgcggtggctcacgcctgtaatcccagcactttgggaggccgaggcggctggatcacaaggtcaggagagcgagaccatcctggctaacacggtgaaaacccgtctctactaaaaatacaaaaaattagccgggcgtggtggcgggcgcctgtagtcccagctacttgggaggctgaggcaggagaatggcgtgaacccgggaggcggagcttgcagtgagcggagatcgcgccactgcactccagcctgggcgacagagcgagactctgtctcaaaaaaaaaaaaaaaagactggaccagttattaggccttaagttgatgtaaactatatgacaaattgacaatttagagacattgtggggacatttctatgaaacgtctgtttattattcattcctgtgatgattttgaaagggcaaataaaatcataatcacatattgtataatgctttttgtctttcaaatacatatacattaaaaatgacttatataaagcaaaatgtacctttttgtgcacaattctattggtttttgtggatgtatactgttgcataaccaccatccaaccaatacacagaagagttctataacttcagaatattcctttgtgctactcttttatagtcattcccatcttcccatccccaccctctattgacccgtaaactgttttctgaataaatatctgggaaaaggattgctgtgccacatggtaggtgtatgtttaaagtttctcagaagttgacagactttttccacggtggctgtaccattttgccttctcaccagcaaaatgtcagattacagttgttttgcatcctggccagcacttggtatggccacttcatttatttatttagctcttcttctgataggtgtttagtggtatctcattatggttttaatttacacttctctaatgattgatgattttccccggtgactgatgatgattgaggatcttttcaggtgcttatttgcctcccatgtgtgtatcctctttagtgaaatgtttgttcaaatcttcccatttcaaaaaatgttggcccttttcttattatgaaatttctatggctctttatgtcttgtgcatagaagtcctctgtcaaacagatgtctgttttgcaaatattttcctgatttgtagcttgtcttctcaatattttaacagtgtcatttatagatcagaagtttccaattcttcaggtctggctcccctccataatctgtttgctttgattcacttttcagcatcctcatgtagttgctttttgtgtttggtctgagattttacttgtgattggcagggagagataggctgaacgtgactgagtggagtatagcatgagaagacttgcataatattttttttaattttcagtgttttgcaaacattatttttgatccattaataatgttaatgattgccattttatatacgagaaaataaaaaaatcaagagtcataagagtttaagttcataaataataaaaagccacatggaaataaccagtgatctaaatcacctggaacaactaaaaccttaaggtattatatcctagtttgtgtgttccgaccacaagcccctagaatgcaaattacttatgtaccttatttaattatgtttgctttacgtaattttagtactttaggaacttccttgattaaatttcaattcatacatttgctgaaaaataactaattttaaaactaagtaaggttattaagtaacttttttccatctggaggagaattgtttttgttccagattctttactgacacaatagtagcacactcgaataagtgcatagtatgcttcatggaagatcatgtgtaaaagccaggcttagtcaatgtttcttctgataatacatgtgaaaagttgaaaagaacctttatggtcattttcctagtaagcaagtcaattccttttgcttaaagcattttaacttcattaatgtaaaagacaatagatatctactatgtatacaacactttttaagagatcttgaggttacagaagatagtaaagccatggtgtctatccttaagaagctatacataataagaaagaaagaaatctcactgtgatattgagtatacatttttggaaagtaatttttgaataaaatcagatgttttaaaaaatcgtaaaaggttttgaatcaacattttcaaatatttagaaaataaatgagaaaaaagacagacccaaccaattccttccagtaattttgctctgatattaatgtaattcccttcagcttttatgtgcatattatatatgttattaaccatagtacatctttaaaacatatataattttgtctgctcacttttttttaaaaaaacagcattgtatcacagtttattttcatgtaccttcatagttcaaggtacaagggaagtaacagagattccctgagagaagacaatggatgttcctaagaaagacctagtgtgagagttcagggaactgctacactttggattttttttttttttttttttttttttgagacggagtcttgctctgtcatccaggctggagtgcagtggcacgatctcagctcactgcaagctctgcctcttggggtcatgccattctcctgcctcagcctcccgggactacaggcgcctgccaccatgcccggctaatttgttttgtatttttagtagagacagggtttcaccgtgttagtcaggatggtcgggatttcctgaccttgtgatccacctgcctcagcttcccaaagtgctgggattacaggtgtgagccaccacacctggccaggattggttttttaaaataatgtagaatgttttgtatttgtccttgcatcatgtaaagatttatccttaaaagtgcaatttgtctttggactataaactctgcgagggacaggacagtacttacatagcatgttaaaaattcaagtatcaatctacccatttaggtctattggctctttactgagtccagggttttatttacatgtatcactgaatgaatggccttaagaaggtacagatgagactactgaggcatagagagatttaacagaggcaagcagagcatcacaagcagtttggaactcaacacatgtttcttgtttgaaaatatgcacagacaaaagagggatggatagaaagttggttcaatataggattaagacctggaacaaaagcacatgggcaccagcagaatctacttgagaggtcacagcgcccaaggggaaacaaccctaggcaagtcacttaacctcactcaccttagttctcttgttggtaaaatgcagagtttatgcaaactcaatacatgtcaagaaatatctgcaaggcattgtttaaaattgaccctctggatttttttcatgcatgcctggttattatttattaagatgtactaggggcaagtctcaaatggaagaaaaaataaaaggcacatctgcaaagtgaagaagtggggttaagcgcaatgcaacagaaactcttatactaatccaggaggactttacctgtcaatcaaatctatattcattttttttaaagattaataatggtttgttaactgagtaagctggcagatggtaaagtaatgtgatgagatcttggggcatctatgaccagttgatgactgactgaccaatttcaaaagatgctatgaaggatcataaagtttagttccatgtggattttgatgatagttgcatctatatttaaagccttctgtcactggaagcactcttggtgttgtcagactgtctattggactggatgagctgcaacttctcgcaattgaatgtcaataagaccaaagcaattttggttgattcatagcaccagcttaagcatattcacttgcacagattacatttgacagatagttaccttcagctgaactctgtggttagaggcttgggcgtattcttgacagtgagcttagagttgatgtctaatgtttatttcatatcctgtttttaccttccctaatattgcatgtgtaaatctatatttaaatatattcacagctgatgttcttgtcggtccacttgttatctctggacagaatgctgtaatgattcaatttaattattttaataaaaataacttgcacccctccagttttaatttcaataaatctgacgagtaatgattaattttaaggagtcttattgatgagcaattgcaacactataatgcaggaaaatgcccaagtggtgggagcatgcttacatctatagtaaacttaaaaccttcaaaatttggtgtgtgattatgaacaccgaggaaatatatccacatttatttaccaaattattattcctgtatcttttttaagttatttaggtccatcagttatcttcaaagtttaggtttgaaactatccatttcaagaatattagccttttaagatgattataatttaaataacatattctaaaatgttttaattgaacagtagaatgcatgtaacccaaaacattataaaatttaaaaagtcacggccatttttgaatatttagattgggaaaacacttaagatgtggttttatgttcaagaagaggtgcaattatggtatggattcattcatcattatggtattgtattgtcaacttttcagttatgttcaatttttaagatgctgggtgggaaatttaagggacatatagatctaataatctgagcctaaatctcctgctctatacaaataactctgcaaagctttggaatccctttatttgactaggtgaatggcagttttgtttgcatcagcctaaacctagcttggaaatcatgattttaaagcaaacacgttttcctcacacatttccatatttcctagaatctatggttttaagatatcaaacaattcaaattatgtagttatacatttcacacaggacaaaaactcatgctgaagtaggtaaaatatttttcaaaattattttctctacatttactggcatactttctctttcttactgtcttttaaaactgacagtcagttttttttatttttctcttttactgacagctagtaaatgtactgacagttcagaagcaagatgtaaatgtaagtcactattattttgttcacctgatacctgagcattagtagaaatgcatggctatattttaaaataaaaactagattatttccaatggttctgaagggaagatgtatagaaaaactgtcctctgtaaataaaaatgtgtttgaggcaagattgcattacatttagaaatagcatactttcctcattaggatgtgattggtatttgtactgaagaaaatgggctaattatttaagtaagatgtatatttactttctgtttcattagctgtaaatctttatagcatataaatctcctttagaaattaatgggaagtatataagtgagggaaagaaagcaggttatgaagttaataaataccatgttaaaaattagtttctacttaaatataaagttcaagattaaaaattaaaaattgttttattttaattagaaaaatcttgcttagttaatttctctggaagaaatgctatataagcagttaaatgtggagaattatattctattgataaaagtatgttgggccagactgaaccaacaacatcatagaaggactgattccttacttcctttaaaaagtgatctgtcatttgtctacattataaataacagctgagttttaaaacacaaggagatttttaaaaagtggcagcatttatttatttactgcttagacagtattcacagtattttatttcatccttaagactctttttttgttttgctcccacattattgttacacatatgggaattggtaaagtgggaaaacttagcatttatagatttttatactgaagcatgcgatgataaagtagtcactttcatccaagaaccttttcctcttttcacttacactagctcttccagaaatggcccctttagtgcctttaatggttttattctccttctgtcactatttttaatattcttattcttatactgccatcatatataactttgtgaaaatttgtcatataaggttaaaattgatttgcctttaaatacagtagtttccattttctgttaactgtttgaagaacacctattgagaggcaaggaaagacctgcgggataagttacaaaaggcaagaattcctcacagaaaaagcagcaggagcttccttgtcaagagcttcagcaagtagtgtcagcagcttagaagttgctattggactgctgagtgttatgcagataaattgtggctctagcttgtcctccgatgtcattctttgatttttctctgttaacactgcatttgcatttgggtctcactgagaacaaggaccagtgcaaatgccttatggcatgtgtagaaagctgcttttatgttaaaagtgatatgttttcttgttcactgtgttcacaacaaaaattcatcttccgagtcttggaattcccttatgtatttgtaattttccttccaagtcataatattcatatacaaagagtggaaatttttctttaaaaaaacctaccaaacaacaaaaacagtaaagttagttggttactagcagcaacaactgaaaagcagcatcaccaaaacatatgcaattcatgggtttccagcaaaagaggaaatctggaaagagaagatccttaagtattgctttaaagtgagcactgaaggacagccgttaaaacaatcccaatttttagaaaaggtattattccctgacatttacttgttttattcccttctcaatctgaagacacattttggacagatgctcttgtcttacatgaacattcaattcatttgagaaaataatggttatacttaaactcgtgaagtgaaatgtatggaagtctgttgctttataactttaaatagccatgtaacttgttcatggcagaatatagtcaagtcctgggcaaggactttttttctcttctccaataatgctattcaaggggaagctagttattgtgtgacacatgcttgattctcaggaggtttggacaaaagagagggttagaaggtcaggagagcctgacgctattcaactagatatttgagtagaattcccacaccagaattttgcctcatacctaattcagacagtgtaataatgggggaagggcagagagagggagggcagatggaggtgtcctttcaggttaaatgttaaaataagggtcttcatttctgtctctggtggcacagagcattaaaaaccctgtgacacattttggaagtgttgctataaaatagattttaacgtttgaggatctataaagggtattattgagtacttaatagattctgtgtttgcctactgaaatcactacaccgccgatatatacctcattaatttgtaaagcagtttggcccaacttgagacaatgtactgtattaaagcaaagtctatatcccaaattttcatggctaataattacaaaacgttcagcatctgaagaaaattatctaaatgtgacaatattggtcttggatagtttaacttgcgtgaaatatttcacacagaaacatttgatctatattgaagagttgtttcttttttcatcagatcagctatatcacagtaaattgtggaaatagaaaatggaaactaaattgttgaaaatgcatctgatagtttgtttttattgccaaaatgtcattgtccttgaggtccatcactttgtagcttagtaaaaacagatttaggcattgcaagtgagaagtcattgactgttttccttgtaaccaatttatttatcaagttggtaagtttcagaagtatttccagtgttcagcctatttcttcacttttctattttccaaattatatcctattacttcaaagatgtataaagttcacacattctggattctttatctcttttattgttttctgcttcatacaaagtaattaaattatgttcttgaagtaattcctcctatcttacttaaaatcaccttcatgatctgtcaagagttttcaagttgttctgtgataaagttcttagagtttgagaagctaaatggtggagttggtgcttaagctcttcactgaaagctgcaagagtataaacgaagtcagaaattactattattattatttttttctcattgagacggagtctcactctgtcgcccaggctggattgcagtggcgtgatctcagctcacggcaagctccgcctcccgggttcgctccattatcctgcctcagcctcccgagtggctgggactacaggtgcccgtcaccacgccaggctaattttttgtatttttagtagagacggggtttcactgtgttagccaggatggtctcgatctcctgaccttgtgatctgcctacctcagcctcccaaagtcccaaagtgctgagattacaggcatgagacaccacacccagcatatatatatatatatatatatatagttttttggtttttgttttttgtttgtttgtttgtttgtttgtttgtttgtttttttgagacgagtctcgctctgtcgcccaggctggagtgcagtggcaggatctcggctcactgcaagctctgcctcccgggttcatgcctcagcctcccgagtagcttggactacaggcgcccgccaccacgaccagcaaattttttgtatttttagtagagatggggtttcaccgtgttagccaggatggtctcaatctcctgaccttgtgatccgcctgccttagcctcccaaagtgctgggattacaggcatgagccactgcacccggcctgaaatgactattctttttaataacttctatttattgttttgtgttattcataattgttgtgcaatttaatttatttcactagtagaacactatgtacaggactgtactgtgtggaggttttagaagtgacaaaaccagttaactaggctcttggtccaaaggaatttagtgaaagagataagacataaacactaatgactgtaacatttatggaataataaataggagctgctgaaagttgtgatttcttctcattatgatagtgcttcttggattataaaaaatttaacctagaacatgaggtttcaagaggcagagatggggagagaagaattccaggtttgggactaggatgtagaaaggcagaaaggtgaaaatattcttgtgatgatggcaaacagtgactggtcaagtttgccaagagtaggttttatgcaagagcgtagtaagatgaaaccctgaaggaattttactgtcagatgatagaaaccggaataaagctgaggatacagttcaataatcaaagggaaccaaatgaaagttttgagcaaagaagggatcttattaaaacagccttttattatttcttttaagctagaggtagcttggcattatctgtgccagctcagagtgaccttcaccccaaaattctagttggattatggagcagttaatcttacaggctctaataattctgtcaccctttgttgtcattctatatctgtgtcccttcagttatgtgtcttctcccatattctcataccattatttctctgtctttcatttctttactttcatcatccacatcaggacaatgtttttattctatagtagtttgtaaacatgtcacattctttagactttcaagctctttgtcaacagtttttcaaagtccttgccttacataaacactaattctttccctttagggacccctttcctggcccttccaagcaaagggtgctcattcatccactcctcatgcacctcattgctgggagcaagtagagatgtagggattgctttcttctttttcttttacctcatattggaaagagatgtttcctttaaagctcatgttaagttgttgtgtacctttcttcaatttttgcatcaatttttgcaaaccttgcatcaatttttgcagctgctgacaccttggataccccagccacctgcctgccagatacaatgaaaaatttcacctctgactcacagtgtttctctgcatcattatcagcttttggttaatgaccatgaagcttcactttttcacctcttgaaaacttttggctacagaatgaagttaagcgcctaggtgcttatattgtctttgagtctgttgggttccttctaggttcagtttcttcacttctagcctagcccacaaggaaaatatctttagtagtcttttaaccattttcttttatttcattttttttcattctgttgccaccagacacctattctcaaatcattcacctgactgccttcttaattcctgtgtatagattgcagaatattactgaaaaaaaacaggtgtgtggattgaggccactaaaaattaatgatttccaactagagatggacccttagtgcagccttagggtaaatttcagaggtgcagctgattcaaagggtgtgcacaatttcaggggtatattgacctactgtcttcagaaaatgtttgactagtgcagactcctaccgaaagagaatcagagtgcctattcctcaaattattgttaatataaggaattatcttttctcatttttttctaattttatgggcaaaatagtatgagtgtattcttatttcatttagcatttcttcccctacctcgtacttatcttaccttacataggcttattagccagccacatgtattttttgcttctgggtaatagctgtgtattgttctcttatttttttaaataaaggggtctgcatttttattaatgactaagaaatcttgatatatttagaaattatatgtaaaaataattttaaattttttttattctactttaagttctggggtacacatgcagaacttgcaggtttatgtcatagttataaaaaaagaaagaaagcataggcagagaaggaaaatcactctggacagaaaaaaataattggttaaaatattaaagaataaaatttgtaggtaaaaataataaattttaaaatgacagtttaaaaatttatatgtaggctgggtgtggtgccccatgccgatagtcccagcactttgggaggcctacgcaggaggatcacttgagtccaggatttcaaggccaggttgggcaacatagcaagacgtcatctctacaaaaaaaaaaaaaaagaaagaaagaaagaaagaaaaaaaattagccaggcatggtggtgcatgcctgtagtcccagctactcagaaggctaagatgggaagatcttctgagcctgggaggtcaaggctgtgagccatggtcgtgccactgcactccagcctaggcaacagagccagatcctctcgcaaaacaaacaaacaaacaaattacatgtgaaaagaattatacgtgaagataataatttcagacatacaatcctatgttaactcccatagaaaattaagggagttatcacacctttgcttttaacaattctttctcttcccacattccagttttgttgaaataagcagagcttcttatcccagcttattgtagcaaaatcattatagtaaaatgatatttttatttcaagcattacaatagcactttataacttatttaaaaatttatatgatgttaaaaggattcaatactcattgagtatcctttcataacatacatctctaatttcttaatttgaattgagctttctatttggtgagagtatttctattctgaaaaggaacatggccagtgatgtaccttctgaatctttgcgtagttgagcctgtctttctaatgcctgtacccatgaacaatgtctggatgatgatggatttttttttcttataccctttcgtttgtgagcttttaatacattgcatcgtgtttctgaagagaaatctgagacaagcttaaggattatttttcactgtgggtgacccgtttttgtgtgcctgagtgagattcttacaggtttctttctttatccttaaaatcccaggactaccagcctatagtttggtgttaattaatctttgttttcttgagaatatggtaagcttttcttagctgaatattcaggtcatatttttaatcccttaattttggtttctatcatgtctttgagtttatattttcattatttgttttcttcgggctttcatcctgtgaaatttagtgaccaatatagttttattccttttatgtccaagatacataagaagttgtatgtactctagtgtccattcgttcatcaacttattccaattaccccaaacccctatttccaagggcttttcttcttccgttcagactctttatttgggtcttttcgtggttccttgcttaacactatgcacttttcacggcacacactttccctgggaattcttactcacaaccatgactcctagtactattttcatatgcatagttataaaacctgtaatttctaaatttatattgccacagtgctatcagtgagctttcaaaattcaaattcaagtatgatttttcttagttttaagatttcttcagttggaatggagacccttaatgacttagctctgacaactgttcagcctcatgttctgtaaggtctcctctgggacctcacattctagtaacactgagctgtctagtctttaattgtatccatctttcttatgttgctacaactgcacatgttctttaccaagaatactctcccttactatttattccgcttaatcctactttttcctttcactcatttggcatcaacattttcaggaagccttttcttatctcaaaatctgagtagacatgcactcatcctttctatgaaattatcgcaatttactcaatgtgctttatttgtgtccatcactagactccagaacttttagatcaagaattttaccttatttagtgttgttcccttcagggctcggcatcatgtttgaatgtgatccattctcaataaacaaagtttgattgaatgagtgatggcatcatccagtattagaacaaagttgataggacagtttgtttagaagctcttgcaagaatacagttgacccatgaactacaaggaattgaattgcccaggtctgcttttatgtgaattttttcgagctaaacacagattgaaaatacagtacttgcaggatgtaaaatccgactatgcacagggccgactttttgtatccctgggctccgcaaggctaactgcgagacttgggtatgattagattttggttatttatgcctggatcctggaaccaatcccttgaagactgtacagatgagagatattagttgatcgaatatgtagcaggagaaaactgaaaaaggaaaagaaatttatgaagtaaattaatgagaccgctgcatttcattactactttggagattagaggaacaataaaggtgactttaaaattttgaaccaacttctttataacatggcttacaagtggtagctagaaagaggagggttggttacttttgctttgtatattgcaatacatttctgattgttccctttccacttttccccctagtattgttgattactttgtctttgtaaaaaacttcatcgtgaaaatttctttctaaaatgtaaatgtgattacctccttcctctccttaaataaacactatgctcacgattgctcacactccagagaatgaaatttccttcccttagcaacatgttcaagatccttcaaaatttgttagatggtgcctctatagcttcattgtccttctatgtactttgagttttaaccatgatatttttttgcctcccaaaatcatgtactttgtggttttcatgcaagctcttcctgtttgccttattcagttgcttctagcttgtacacttttccctctccctcttcaactccatttctttgtgtacgtatctcaatgaccaccacaaatacaacttcctctgtaaaacacactaatttcttctctccttttctcctctctgctcctatagcacttttttttcttattggctgtatgacatttattacataggcatattttattagatattaagtaggttttgcattaggtatatttttgaatgtactgaaaggcagatactttattcattcatatgtgctcagaagagcaaaatatctcttacataatgtatgtttaatataagtaaatatacaaacaaatagaaatattgagtttggtaaaagatgatattgagaaaaagtgatatgtgatagaatgaaaagctacatatattttctaaatgatgggtggacatttacaactttgctaaattatatattaaatcatctctttatcctgaaaaaattatcttttccatgattagtaagtactttacagtctcttctaggttataaagctcagtactctaattagttttagaaaaactgtgactaaactagcagtactgttttttctcccatattttgtctcacactgaagtcagtgatatttttttctgttcacagatatattcactcttagccttccctgagctctattacagcctggaaaataactggaatttcctttaaaataatacacattttcttaacttatcatattaaatgaaaaacacacaaacactggcctcctttcacattccctagaactttttgttttttctgtatttggcatttctgatgtctttaattttttgtgattctggctctgtattctggtgcctggaacagtgttgcttccaaataaataggcagtagtgatagcaatactcataaatattttaagctatttggaaaaagatattttttagaagctgtgttttgaatgaccttcccatttaactacagtgaatttcattcttagttccttcccaatatctaccctcttgcatcttcttttatgttgtttctaacgtcttttgcggtacctatcaatttactgtcatctactgttttcattaagattgctacttgtagatcattaataaaaaggtgaaataaaactaaattccttatcaattctctccttaagtcaataagtatccagttttaaatgacagtgcttgaattcaagttcatattaaatgttacttcaaataagtttgggagtttacacatacatggctctttggttcaattacatttgtcttatttattttgttttctgttcccttgtagtattctttgataaacttgtcctttaaaatatatattccaactaaactctgcttagggcctaagtggtgtagccctctggggagggtcgcaaatgtaatttgtttgattggatactcaagcttttcaattgttttcttttccttagagaaatagaacctttctagctttcaggtcaattgatgtaatggttggattcagatggaatgacactttctccccattgtaagtctctagttcctcagagaaatccttgggaaatctgttgacaacttgctgtcatccagctgttctgatggtataaatgacttagacactgattcctggtagtttaaaagtctaatggaacagtgaaattttgagatctcaagtgcatcatgaataaagcacttaagtagcacttgtatatacttcttacaatttgttaactggttttctgctttttttttttgctggagaaagagatttacagttttaatctgattagacattagcagctggttgaagatgctattactgtgaagtatggaaaagaacacaatcatgatgaaaactttttactcaaatccttagaagaagaaagcagatgaaattagattggcaaaggaaaccagcccaaattacacacaggagagaaatgtagcagaggagagtactgagttggtgctgcacgcatagagcttacagcctccatgggcaggggacatgtgggtgtgactgccagggacaggaattgcaaacagcatttggagtgacagtctgggtcagcttctcatgctctttcccatcaccaggcatcagcgagtggaaagatttgacctgattttggagcacagagtgtgggctctaaggccacaggaaggcaggtgaatgggactaggatgtagtggagtccccatggctaaaaaataagttgtattgcatacctgcctttgccccacaattatcaaatccaatctagggtgaatagaaacacatctgcagacagatccaatgtccacctacaaaaagtttcagaaaatgaaaacagatggagaaaaaaaattataaaaatataaagaattctggtaaagttgccaaaagaaatgagtcttctagtcaaatgggctttgttctattagtagatgttgagacgaatgcagtgaattgattagagctgatgttatttgtttgggtgcatacatgtgtgcctggtgaggggtgggtgagggaagaaaaaaaactcaaacaaataagaaacatattgagagaaaaataatacctagagaattaaaatagtacactataacaaagtttgtgagtgattattaaggcttgtgtgggtattcgggggctctctgaggtgtcaatatgtaaactgagatctgacagtaaagactcagctaccttatatctcttcatccctacatcttgttctaagaaaacatcagaagtcctgtgatctcagcataagttgaaaactcgtaagtagtcattcaaaggtggatttgtggagggtagaggtaaactaccttgattatatttacatagaatggaagtgatgctaatttagaaatgtccattgctgtaagtcttaggagatgtaaagtaccaatgaaagatcctgaacagtattatgtgacagaaaatgagcgttacacttttaaaaaaatattagatgttgtaactttagtcattctcacctttaccttttaagtatttcaccatttaatatcaaccttcattattgatttatttctaaagatatctggaaatagtttaggctcattaattttctttttaagagtcaaatcggcatgcaaatgtttctcccaccaagaaatttttttcctggacttcaccttctgaggcatgtccacctttgaggcaagctaagccaggctttgtgaaggcagaaccatccgaagcacacagccccaccaaatttctctccctccttccctccctcccctgttcctctctccttctctttcttttttctctttctttctctttctttctctttctttcttccttccttcctttctttctttccttctttctttctttctttctttctttctttctttctttctttctttctttctttctttctttttatttctttccttctctttctttctttttatttctttccttctctttctttctttcttttttttttctttctctttcttctctcttcccccctcccctgctctcccctgctctcccctccccttccctttctttcagctgctgcttacctggggtaacatggtttgggaagaaacatgtcagaattggagtgaataaatataaatgataaaaagacaaaatgaatattattttcaagagtaattaccagtatgaagttcttcagatgataacaaaaactattgacttattttgtctaaatcaatgccactatcttatctgtgtgattgtgaagggaggaaaggaaactgttcactgaatattctgcatttgacccgtaaatacctacttttgtattcagggatgatatattcttaccttaaattaatgactgttttctactgttcttttttggtgcaaacaaattaaatgtgtgcacttctccatgactgattgtgcaaaaactgcttagacaattactatctctctagcttttgatcagaaaggactaccttgaaacaatggccacaataatggtattattctcaattctagaatttatttaaacaaacaattcaaatcatatttcataatacagttctctgaaggagcttaaagagattcagatttttccttttgtttaacatggctcttcatttagtttttgaggcatatttttaataaattttgctcagtactgtctactggagctgaaaaaatctaagaagacacaaaatggctgaagcataggtacttacagaaaagcatgcctttcttttaagaatataaaattaatacattatttatttattatataatgggatgttctacccttgttgaagattttagcagatataactcatgcacagtgtaagtgagcattcacccctgttttgtttatatggcaggactatttctacaaattttacaaattactgtttaggatctttatgacatccattgagtgctggcatgataaatgattttctatatatctgtctacatattgagggcctgattgatggcccttctgacttggggtcagcagtgagttcacatctcttggtatactttggcttattccctggaagtataaacagaaatccaatgaccactattttcattattttccttcaggcataatctgacctaatgatatgtaactgtattactgtgatttaagagatttttaaaaaactataaacattttgaggaaaagtgaaaatggtgattttaaatttaacacatttaaatattcattttatgaaaagaatatttgaaagaatagggatttatcaggatcaatagaaggcttggagtaacctaatcattttaaattttattccttcttgtttttttctgttttcccacaacttattcactaccctctatattctcatactttgctaaatcatattaatccttcaagagttggtttagatgaagcttcattcatttgataaagattaaatgagtgtccagtagttgctagctcaccttgttctgttgtgcttcacagacaatgtgttttatttttatttttattttatttttttacaaagtgaaggtttatggcaaccttgcttcaggcaaacatgtcatatattagtgctatttttccaacagcatgtgctcgttttgtgtatgcttcacattttggcaattctcacagaaatttaaatttttttccaatcattatagctgttatggtggtctgtgatcagtgatttttgatgttattataatttcagggggtgccatgaaccacaccaatatgatatggcaaagttaaccaataaatgttgtgtgtgttatgacttctccaccgacagaatgttcttctgacttgttccttctccttgggcctccctgttccctgagacacaacaatattgaaattaaattagaccgagtaataaccctacagtggcctctcagtgttcaagtgaaaggaagagtaacatttctctcacttgaaatcaaaagctagaaatgagtaagcttagtgaggaaggcatgtagaaagttgacaggttgaaagctagtcctcttgcaccaaacagccaagttgaatgcaaaggaaaatttcttgagggaaaattaaagtgctactctaatgaccacaaaaatgataaaaactgaaacagctttattgctgatgtggagaaaatttgagtggtctggatagaagatcagaccagctacaatattctcttaaaccaaagtctaatccagacaaggccctaactattccattatgtgaaggctgagagaagtgagcaagctacaaaagaaaagttggaagctagcagagattggttcacaaggtttaaggaaagaagtagtttccataacataaaagtgcaaggttgaaagagcaagtgctgttgtagaagttgcaagttatccagaagatctagataagatcactgatgaaggtggctacactaaacaacataatttcaatgtggatgaaaaagtcttctgttggaagaagatgccacctaggactttcatagctagagaagagaaatcaatgcctagtttcaaagctccaaaaataagactgagtctcttgttaggggctaatgcagttggggactttactgcacaggtggtaggtgccctaacccccatattgttaaagggtcaatggtttatagaaataatatagaagtaagtgtgtgattctatctaatctatctatctagtagtatctgtctatattcatattccctatatatccatagtccctacagccatccactgaggggagagagtgggcctgggagtagtaacactgaaatagcacgaatctacttagcaccgaatctttgttcctaaagaccactcatctcttagaggaaccaggattccttggagaaatggctgattccagggctgtggtggggaagtacaaaatgagcctagaacatcttgtgtcataaagtaagaagatacttaaagaattattagaacatgtcaatatgatccagaatgcagctgtatggggtctatactgtccaaacctggaacaacttgagcactgaaatacatattgagagtaattaattatatcccactgagtaaaatagagactcatgagtctatatagataaaaataagcctaagcatatattgaatttttaataagcaataggatatttatacagtcttgaagtatctgctcgcaaaatgtttgctaattgcaaaggggaaaattgtatttttacagtgtggaagcctggcagatatattaatgcaaatgattaaagttaacatcattaataatggaacaaatagaaatgatgtaagacatgataagatataatatgatcactgtatcacctgaatttaatcatgaggaaaaattagacaaacccaaattgagaggcaatctacaaaataactgggcggtcctctttaacagtattaagatcagaaaagccaaggaaagattgaagaactctttttttttttgggtcggcactgcttttttattttattttattattattatactttaagttttagggtacatgtgcacaatgtgcaggcttgttacatatgtatacacgtgccatgttggtgtgctgcacccatcaactcatgatttagcattaggtatatctctcaatgctatccctcccccctccccccaccccacaaaagtccccagtgtgtgatgttccccttcctgtgtccatgcgttctcattgttcaattcccacctatgagtgagaacatgcagtgtttggttttttgtccttgcgatagtttgctgagaatgatggtttccagtttcatccacgttcctacaaaggacatgaactcatcagtttttatggctgcatagtattccatggtgtatatgtgccacattttcttaatccagtctatcggtgttggacatttgggttggttctaaatctttgctattgtgaatagggccgcaataaacatacgtgtctctttcagatcaaaagaaaacttagagtcatgacaactaaaggcaacatgtgatttggggctggaggtgttttttctataaaagactttttggggtcattgacaaaacttgaatgggctttaaagataaaatggtaatgatatacgaataactttgatgtttacatcgtgcttatgtaaaagaatgtctttttgtagcaaatacacgttgcggtattcagggggaatgggtcattaggtcaaaaatttaatctcaaatgggtcagaaaaaattctttgtactactcttgtgactttcctgtaacgttgagatagttattttttaaagtaataaaaaacagaaactactgattgagctgcattacagatagaatgggaaaagagaaaatggacagaggaagtacaaacaacttacttgaggaacacctcaatagagagaagaagagtaacagggaaatatttggtggaggagacttccaagatattttcacgttctcatctttgttcctaaccactttattcatatttatttattatattgcctcctttcattgaaagtattttatacgccatttctattacagattgtaaattccttgaagaaaaggtctgtgctttatataccccttatgtgtagtatatgtagcatcacacttagcatatcataatgtgcttgtttcatattcaaacaacaggaccattttcaaacaagtgattggattttagtgagagtatgaagagcagttttctttataaacatgggagacaaaagaggttgactcacttttaaggagaggacattgtagttataacaagtaacttctagctcattgggatgtaacatgctgaaaaagttttctaaggtattttacagctaacttgataatcttttggaaatcatctgttctccatgagtaaaatagaaaaaggcacaatgatatattgaaataattaagagtatctaatattgtgatgaagtgtgcaccaaaagctttcttaaatgtagaagtgtacatgacacctctttaagcagtatctacaaaaaaccagctggaactctccctattccttaggaattcaataaatcagactgttggcagattttccatcatgtatatgtgtaaattaatagcttttttttggcagtagagagaagagagtaatctaaatgtgtaggaagaagaggccatgagagtttcacatccagtcaagataggacaaaaaaaaatctacttgcattcctatgttaaatttttaaagatcaattaaatggagacttgtttggtggaggttgcagtatatgaagagctttaatagagatgaggggagaacagcaaatccagagaatcatacccagggcacaaatgtaatacacgtaggctttttctgtagattgcttcaagagcctggcttggcttgtctgagttactcagagaggaaaaaatgaaagtgagtgtatatgttggtttggggtgtgtgaaggtgtgggaatggagagaagtggacagagggaaaatgtgttgaaataaaacaccaggagctcatggaaaatgcaaaacagaaacaaaaccaagaaaaaatctttgaggggcatacctgtgtatgaattcatttttccatagcacctttaacatagtcaaaacaaataaaatttaagcagttattcagtcaaactagtagcaggtgcacacacacattccaaacattacaaatatttgtgggccacccacctggttaatttctgccaaagcaactatccctgaataatttcctcaagtacttattcatattgtttgtataaacgtcactcaatagagaatatttaataaactggagcatttataattatataaaaattcatgtcagtaaacaaggccactctgaaaagttatgtgaagaatcacagtatgacacattttgttagaaaacggtgccttttctttattgcttagagttgtaacatcacatagttcatgttgttgttttcattttcggggtatcaattagttgatcaatcagttagtgtttattaagcttctgtccagcaggtaaagcatgctcatcaaatttgcaaatgacataaatgttagagggatggtaaaggcactgcatgacagacatagcatccaaaaagattttgacagctcggagcaataggctgaatctaacaagatgaaatataacatagataaatataaatgcctacctttgggtccacaaagccaactgtacatgtatagcattgagtagatgtgaattagctgttgatgtaagcaggaaaaaaaagacagtattttagttaatagtcagctcaacttaatttatcagttttagctgcatgatgtcattgccaaaaatctagcctgcaattttgaattgtattaaggtgacaatcctgtaccagtttgacaggtcagaccacatctagagattgtagtatttctggagccacattttaagaagagagacactaaaaactatgtcatatttagaacatcacagaaactaaacacatttatcctgaagaagacttaggagaggaatgacatccttctttacatttatgtaagctctcacatggaaaagggattaaatttgtttggtgcagtctcaataattagaactggaacttgtgaactgaagttataaggagatacctttgggttcaatcatttataataattacatataatagtaaaagctgttcagagagaaaggcgttcccaaaatctgcagaggcagaatactagcacagtttagcctgagtgtcctcctttgcaaagtggggacaacaccattgtgaagcagcgatctgggaaggcagtgggatgatatagggaaaatgttcagcacaatgaggggcatgtagtaagtaagtggttatagtacacaggggatgtcacctttcctattgtgggaggtggtgacaccaatcctgaatcatcactgggtagaggtatagaagagatgctaaatggatggatttgacaaactgactgttacttcaaaaccctaactgactgcaacttattaattaaatttgccatttaaaactgtctctgaaaccaccagtcacgcttctatagcaccttgagtatttttttttttttttttttttttttgagacagagtctggctctgttccccaagctggagtgcagtggcgcgatctcggctcaccacaacctccgcctcccgggtttagcaactctctgcttcagcctcccgagtagcccggattacaggctcgtgccaccatacccagctaatttttgtatttttagcagggacagggtttcaccatcttggccaggctggttttgaactctttacctctttacctacctcgtgatccacttacctctgcctcccaaactgctaggaatacaggcgtgagccaccgcaccaagctattctttttttcttttttttctttttttggatagagtctcactctgtcgcccaggctggagtgcagtggcgtgatgtcggctcaccgcaacctccacctccccggttcaagtaattatcctgcctcagcctcccaagtagctgtaattacaggaatgcaccaccacaactggctaatttttttgtatttttagtagagacggagtttcgccatgttggccaggctggtctagaacttttcacctcaagtgatccgcccacctcggcctcccaaagtgctgggattacaggcacgcgccattgtgcctggccaaatttttgttttcaatcctctgtgcttatttttaattatctttaaaatggagaaaaaggtaaacctgccttaggtaactgtaaagttaaaaagaatgaatatgcataaatattttagaacaatgtctgacatactttttttttttttttttttttggcagagtctcactctgtcacccaggctgtagtgcaatggcgccatcttggctcactgcaacctctgcctcccgggttcaaaagattctcccgcctcagcctcccgagtagctgggactacaggtgtgtgccaccacacccagctaatttttgtatatatatatattttttaagtacagacggggtttcactatgttggccaggctggtctcaaactcctgacctcatgatctgcctgcctcagcctcccaaagttctaggattagaggtgtgagcctccatgcccggcccatactagctttttaatatatgttaactacttttgtaatgccaaagtaggtggcaaaggattattggagaagagaggacttgagatgtgtgttttgaaaaatactaaaaatttagttaagtgcctatatggaaatagcttgaacacatcatgagattaagtggtgtgtgatcgtcagacagtgaggagactttaccagttagattggaggtcggctgttggtgaaggttagaaataaattgggtgagatgagtgaggaaaaatctcagaaggccttaggtttaggatggtaagcaataggatgggatgtgtggggattccacgtgttcgtaggtaggggaatacaacatacatgtgatttttaaaataaacttatagagttttcaggatacattgccttactttagcttaaaaattatggatggaatagtggaatctttttatgcaaatccttctttcacttagaaatagaaatttctatttcagggcaatttctatttcagaaagtccaagacttttctcctccataaagttttctcttctgattcatattacagtggttttctttttgtttgaatttcttagcattcaaaatgatgttccttatatttgtatcatccatcatgatcttttaaggggaaatttaaatttaagatacgttgtcaaatcgcttaatgttaatctattagaaaggtgttattctgaatgcataaaatggttttgctttaaatgaggccctccaaattaataaaactgctcttcctgggaagcttctaagttggttctgggaaagcaagtcacacagagaaggtccaaaaatacgttatacaccacatatattaacaaattaagacataatttctcaaagcaactccttggaaaagataatccttcttgactgcattaagattcagtatttaagttagaaacaaccatcatcatttatagtgattcaaacactatctagcatattaaaatgtattttgttgtcatcatacatacaagctccttgagagaaaggatcatgacttaactcttgttggtgtagctcatagggccactgtgggtaccgagttgatgctttatgaattcagtttaaattagaagaatgtaggcaatgggattaccatttgtccagtaacaaattcagcacaggtattctgtctctctatttcccagcctgagtcagcagtttcttttagttctgatggccagcaggagtaaaatagcagcaaagatctggcatttcagtggcacaggtgattgtggaaaattactataatctaggtggactcgattctattttccccttgctaggtactgagatattgtgtaactttctggacttttgaattatacttctcactaatctagcatgagaatgggtggatagtgtcaagaattctacttaaaaaaaaaaaaatctagtgtactcttgtactcaaagggatgagtacaatctatcacagggacacaaatgtgaccaaaaaagtggttaaaataaaatatgaaactgaagagaatgaagatttgagcatgaccttctctgtatcttctttccaaagtgttttcggatctcttatgaaggggatttaaaggcttttctacaactgctactgcttttgtcaattcattcattcaagacacaccaataaacatgcacgagctcctcttgtcctcatagggctagagaatgagataggtgcaaagtttattttagcagaaggctttcttttcacaaatcagaaattccattgtatgtattcccttaaataactggcaaggggaccatcggaatgagctatggcaaaaatccacctcagtctttacagcttcagggtgatggggccccagatcagaattgtaaaatagtttagagaatcttggaacataaaacatggtgcagaaaaaccaaggaagatttaatcttatgtatggaaaggtggttggtagtggagggggcaatggaagagagtggcttgggatcatcattaatcattatttaagtacctataaagtgaaaatatccttctggaattcactgcaagtgacactgaattcttctactaagcaaatatgtgatgagttgataaaaaagaaggtcctgaactcttgacaacagatataatacagtgaatacagaaaatcaaaaacatgctttctatctgactcaaaataaaggtgcacttaaacttgtaaaagacaacatttttatttgaatgatatgacagaagtgtcacgggagtgttacctgctataaagaaagcctaagaattattacctttattagaccagtgacactgagctttagccatacatttctaacttctgtccctctacagagacaattttcttttcttaaataaactgtcatgctagtgttaatatattgttggctctctcatgctctgagaatactgctgatataaaacatgtatatgttagattggtaatagtatctttagtgtagctgactagaacaaatgtgtttccctcatggctgtgctaatgtgataaaggaaaattggctgttcatcagcttttggctgggtaaagacagtagagatggaaccacattcttttttatgcattaataccactgagaacttttcactagttatatttcatgtgcctgcatgttgtgcaaagatgttgtaaaacatgagataatgctacaaataacaaagtagaaaagcctgtatcttttataatgataacagtcaaacaccaaatgacagtaacaggctgtaaaaaatgggatgcaaaaaaaatgcagccctactacccaacaaagcggaatatatccaggcccttgaggacttggtatatgatttgaggtatattaaagctttgttttaaaattaaatcaaatgcaacactagatcaatggatttaagaaagaacatagtttaaatgaaagtagggtggttagaatggagaaaagccattgtgggtaacttcttgaaataatccgtattaccaagtaattattgtagtaacttcctgttttttttgttttgttgtgttttgcttgtttttttggggggggacattgaaaaagatttttaaggcaatagtacacatgattttaagatgtttgagaataaatgtttatcttcattaattattgcaagtctttttaacataaaagcattaaaagtataaccagtttcaggctcacagcaaaactgagtggaaatttcagagatctcccaaacatgctgtacccccatgtacccacagcctccccctctattaaagccctgcaccagagtggtatatttgttacaattgccggacctacactgatacatcattaccactcaaagtccatagcagaatagcatgttgaatgttttgctatcattttaattaaaatgttaacatccaacctttcctttgcatgaccttaaatctcactctttcctcccctctctcaacccctcccctttccagagccttttatttgccatttcagctccttcactaattagagtaccaattattcctttttcatttaagctaaaagcacttgaacaaaaagactatttgcagagatgaagttgatgtccaaacagctgattagtttatttagaagtgtatgcaattaaaaattttgtgcaggtatctatgggtgttttccataaaagtttgatagcattggctattctgggctccagtcgcataaacaaaaatcccatagctttttaatcatgtaatccaagagttatcaagctacaacctgtgggtcaaattggctggccacctgtttttataaataaagttttatttggacacagccatgcccatttgtttatatattgtctgtggatgcttttgcattacagcattagagttgggcagttgtgacagtaaccatttggcccataaaaccaaaccatttgacttgcagagaaaaaaacattctctagctatttacagaaaaaaaaaattgctaatccctaatatgtgcagttattaggctacttgcttgattgattagtctagaatatgattggcaactttttgttaccctacattggaaaagtatatctgaaaatcaccaaccggataccaatacccaagacagtaaattcaagaaatatttgatcctagtaacttgaattatatccacatgcaattctttgttgttatatctggttttaattatttctttcccttgtactcattttgctctatttccaaatatagccataacaaatttaatttgtatttaaagaagtaacatatcctcaaaaaccctgtaaaacatggcaaccagagctgttacatgtatgggacaaactattatgtatacctgtgaacaccctgggagatatcatcacagcacaaaatgacactatataggtttatatctagataaacacatggagatatcactgagctattaaaataatgttttcagtcttcccagctgaacaaagtaaagaagaaagaaagttacttaataaaaactgctgaaatgtgtttaatataaaataaaagtttatgcacttaaactaataatggtggtaatttcttacaggtgcatcagacaaaaatcagcttctttatcaatggcgtggagaaggatcatacacctttcaatgcaagaactctaagtggttcaattacagattttgcatctggtactgtgcaaataggacagagtttaaatggtaagtttctgacttcagaatgttatttatttcatccaattacattgttcttaaaaatgcatcaaacaaataatattttaaaatatctacgtgtattcatcttctagggctactgaacaaattaccaccaactggatggcagattaatgaaagtaaaatttattttttcacagttttggaagctggaagtcagaaattaagggttcagtggtgttggttccttctggaggctctgagggcaaatctattccatgtctctcttcgtggtagctactggcaatccttagtgttcctttacttgctgcttcctaactgcaatcttgcctcagtcttcatgtggccttctcctctgaatcttctcccctttacctctgttataaggacacttgtcattggatttagggcccactcacagtcaggaggatctcaccctgagttccttaacttaattatacttgcaaagaccctttttccaaattaaagtcatagttacaggttccagatggataatagatcttttgggatctactatataacttactacatttgggaagctttcaaatataaacttctttattctgatcagtttttaagtaatttcaatgtgtaataaactatatttcctttctgtctcttttctgaggggtttgcattttcatgtagagaattgttaaagtagaactacgaagtattagatggaacctgagaaatagtattgacatgtaattaactggactgatgtttacatttactacattaaaaatgggccatatagtttaagaagatatcatatactatatattgaataaaaccagaagttgaaataagaaattatcttgaaatatctagtacagtggtctttaaaatgcctgcatattaaaataaaaatagtattttatattattatataatatatgctcattataaaaaaatctaaacaatatggaactctgtgaaatagaaagtattttccatatttctatcttcagagatagatataatttaacttttttatactcctacagatttttagtacatttttagctagagatatagttataaatacatttttccaaaaataaaattacaatacatatgcttcctctgagccttctaaaaataaatacttctccttcaaatgttataaacaacgtttcatgtcaatgtatcttctcatttagatatatgttctcatttaaaatggctgtattctatgcaattgtatagttgcaatccatgagatttcttaagctcctataatgaacatttaggtttttttaatgtttcagtgcaattagcagttattttatggaaaatattatatatatatccacatatatttatatatctgtgtctatatctacatttccatttatatatatcaaccatcaatctatcaatcatatacatagatgtatacatacgtacatatgtatttgagcagttgcctgattgcacagttccttaatatcctatttggtgccaacctgcgtgaattcatatcccatttcctcacttactagctatatggcctggcaagatattttaatatctctaaagtgtagtcaccccaactttaaaatgatgatgatgatgatcataatattgatttcccatagggccaatgtaaggatcaaatgaagcaatgtcatgtaaaacattactgtgtttcaagcacctggcatgtattagatattcaatatttatttgttaaatgaatgaatggatgaagtgctaagcacaatgcctgtatataaactatattttctctttcttgggcatggggctggattttaatgtacagcattgttaaagtaggactgtacagtattagatgaaaactgagaaataatattaacatataattaactggactatgtggtttatattttcgcacactaaaaattggccatgtagtttaagaagataacatatatgctatatattgaaaaaaattactaaactatatcagtaaataataataatattattattttattattatttttttttgacagggagtttcgctcttgtcgcccaggctggagtgcagtggtgcaatctcggctctctgcaacctctgtctcctgggttcaagtgattctcctgcctcagcctcctgagtagctgggattacagatgtgcaccaccacgcctaacttttgtatttttagtagagatggggtttcaccatgttggccaggctggtctcgaactcctggcctcaggtgatccacccaccttggcctctcaaagtgctgggattacaggcgtgagccaccgcaccctgccgtaaataatactattattaatgttattataattatttccaaaaaataaattcatagaagttgaatggctgggttgaagtatatggtcattttatattttaatacatattacagagattgctctaatgcataacaatgggctacctccagaaaggttgtgaaaatttataacctcattaaaatatatagccaagtacttgtttccttaaacactaactatccttacaaattatccacttttttttcacccttgacattcctctaagtgaaaaatattgttgaatgctgactcagaattatttggccattaatgagtttgagtagctttttacgtatgtcttgatcatttgcatttcatttatgaattccttattcatacaatgtgtccatatttatactctataattccttatttatttataaaaactcatttatgttaagaatattatgttgtataagttttcttcagttttttgatggcttatgaactttgtggtctagatattttaaagtaatcctttaatatttaagcaaaataaaacatgtatgcaagatagtgcataaatataaaaggtatagcttgatgagtttttaatatttatatacacctgtgtaactctcatttaaaaaaagtcgtagaatatttccagaatctcagagtcccctaatgaacatccactgtaaagataaaaacagaatagcatcaatgtagccctctataaccatagattaatgttgcctgttctcaaactatcatacaaataaaatcatgaagtaggtactcttttgtgttctttttgcttagcactatgccaatgagatttttccatagtgtatgcagttatatctttagctttagcaaataattctgtaaagttttccaaagtgggtgtcccaacaagcaacatttgaggatttcagttgttccacatccttatcaactgttagttttgccagatgttatcattctttgccattcttgtagccatgtagtgcatttcctgatcattagtgatactgagatcttttcatgtgcttatttgccaaatgaatatgcttttttgggaagccttttgccaagttttaattggacagtttgtatttttcttaataatttataggaggtcttccatattttgaatatgagttctttgacaaatacatgatagcaaatatggtcttctgggctaaggcttacagtcacattctcttgatggtatttgtcgataagcagatcttcttaattttaatgagtctaatttagtcattgttttatacttaatactttttgtgttctgtttagactatttttgcaaaccctgatatcacgaagatatcctcctacagtttattcaggaagctttattattttacttttcaaattttggtctatgttctatctggaatagattttttgaggttatataaggtaggggtcaaaatttttgtcccacctgaatgtgtaattaacctagaaaaccttgcctcttgaaacaaatcaatgtttctaccattctgcagtggtaacgttgtcgtgaatcaggtctctgtatatgtgaagatgggtttctttctgaactttctattctgccccagtgatctgtctgtctgtctatacttgggccaaaatatttagttttaattactgtaacttcatacatgtcttcatatctagtagttctccaactttttttcttttaagattgccttggctattatatatgaattttagaaacagtttttcaattttcataaaaaattctgttgagatttaaattactcatttgtatttaggagaatgggcatctgaacaatatcaagtatccagcccataaatgtaatatattccttgatttctcccagcaatgtttttagttgtctgtatagaggtctcactcctatttgttagacttgttcaaacatattcattggttttccttcttaatagactatttttttagagcaattttagagtcacagaaaaattgagtggaaagtatagagagttccagtatactctctgctcctacacacgcacagccttccccattgtcaatatccctcaccagagcggtatatggtatatttgttacaattgatgaacctacattgacacatcattatcacccacagtccatagtttacattaaagttcactcttggtgttgtacaacgacaagtatccactactccagtatcctacagagtagcttcactccctaaaaatcttctatgttcctcatattcatccttatctctatcctaacccctagcaatcactgatcttttcactgtctctgtattttcaccttttctagaatatcatatagttgggataaaaaaatcatgtatcctcagattggcttgtttcactgagtaatatgcatgtaagatttctccatgtctttcatggcttggtggttcatatcttcttagtactaaataatattccatggttagatatagcatagttgatttattcattcacctactgaaggacatcttggttgcttccaagttttggcaattatgagtaaagttgctataaacatcagtgtgtaggtttttgtgtgaacataagttttcaacttataaataccaaagagcgcaattactggatcgtatggtaagatatgtttagttttgtaagaaactgtaaaattgtcttccaaaatgactatatcgttttacattcctatcagcaatgaaagagagtccctgttgccccacatcctcaccagcatttggtattgtcagtgttctggctttttggcctgttggttttcatgcaattatacttagtattgtttttgaacttcatttgctaattttgttactattgcattaaaatctaatcagtttttatatttacctatgtttagtgaccttgccaaactcattattatgataggtacacaatcctatcatttgcacatatcaggaactcaactctttttgaatgtttgtaataaatgtatataatggacatgccataaatatctcctgtagatatttttgtctgatgcacttattaattctgaaataatataaaatgttattttgtttttctgtatgacctgagttattagaccaatgtctagttttaaaaaagaaggtatatatttttgatattcaaaacactgtggttaaattgccaagctctggtttaaatataacccaggtgtgcttctttgatcaaaatattaactctctttaagtctggtttctaatctattaaatggtggtttaatatataattcataggaatcttataagaattatgtgagatgatgtatgtttagaatataagttgcttgttgtatagtaaatgtgcattaagtggtaactatttttaaactctttgaacatcaattttcttattgtgaaacaataagatagggataacactatatttccatatgattgttgtaccaatcaaaagagaaaatatgaagaccgtattactttagtttgtgtatgctcttagatcaagctaaactcatgtgaagaagcaatattttaaggaacttatatatttaggaacttggtttgagtaattagtataatgcataatcttataaaatactctgcgtgaagaatttttaaataacacattaaatcttgtgagccttatttcaatatttaatccccattagtacttctaaaagtgttttattgcaccaaatgttgctcaaagtatttgatagcgccataaattagtcccctatgcactgcagggttaaaatggcttgcttctattctacttcagtatactaaatgttggattaatgcttcaaaagaacagtgtgaactgaagatgatatttttaaactgtgtagaaataaatttcactcctgattagaaaacatgtaacaggaaaccggtttatttcaaatattatttagttttcattacaactttctcctttatgttcttgacatctgagagctacagaaggaaaaggatattttaaataatttttatctttattctatcaatttatatgtacagtcgtacctactgtatcttttctctaattagagatggcgtatagactggctcattacttctgcctaatgagccaggctccatgccacctctctaatcagaaaagagataggtacagaatgttcctatggacttattataaatcattttctttctcttacttgctcctttttttaatcaaaaaattaagtcactgtcctccatacttttgtccatatccaagatggtttctttcaaaagaggtaattgtgcaagcgattactgagctgaattaaaggtgctctcatgcagtgccaggccggctgtctctgctttggaacagacactgcctcaaacacaagcacatcaaatgaaggcctatagcagatcaagatggatcttttctgtctttctctgattaggtttgacttggttctctgtttctgcacccagaaagtaacaaccttccatatgagtgttggctactacagagctttttctttgagtcttatctctagcataactctctagaaaaatgtgttgccagtgacactttctgttactgcaggacttgtctttgctttccctggaaaagtaatcaatggaccaaatgcatgctttttactgaaccctcatttatccttattaatggtataatctgatttgatcaggctgaattttatgtatacaaatagaaacaccttagaccatctatatcaaccaaagtgtgatggctcctttttagaacattttcttttagttgtagatttattttagtgcttccaattgggtatataacctggagcacttgtgttagcagatatgtagttatgaggagtcagcaatgtcatcgtggtaataaaccatactagctctccaaattttggatttaaaattacagaactacatgaatcaaaacttttcccagttatttctgaacttgtttatcaacagagttctagttgccgattaaaggtgagaatttctacattatacattcaaatgtgcatagcactttcttaagaagatcattggtcattaaggaatcaataaatatttgttgagtgtctgttaaagtgaatatgcagggaagaaaaggatcatcgtctaaagctaactcctacttgccttcctttctgtgttttcaacgttgtgtgtcttagcccatatgcttgtacttgattctaaagttggaatgctacttctaatttctaccagtttcccatgggttcacatttctaacctctgctagatacacaaactccattttagttcagctgaaatcatgctaatttttttcagagagaattatttttgggaattagatttaaaaaaagcttagaaagtattgaaattgactaagagattggaatggaagaagagtataggaatatagtatatagataggagtttacttagtttcagaacattgcagacaaggtatctagcaatattatcagacaagttatgttgtatatttaaaatgatgttaatgtagctctctcaaccatactaagtaaaaactgctgattaattaaaatttgaatgcaaaatatgcaatcataaggtagtagaggaaaatgaaggcaagtgtttctataattctagcatattaaggacctttattagcacgataccatgtccagaaacactaaaggaaaatattgaaacatctgactattaaactgggaatttaaaattcaaacaacgattatcattttgtacttgatagtttggcaaggactagaaaagcgattataccggtgttggaaatagtttggggtaacctggcaaactatcaaaagtaaaaatgcgaaaactacttaatccaagatttctacttccaggacactatctcgagaatataattagacaaagacttaaatacatactcaaaatgttcattgtagaatgatttaaagtaacaaataactggaatcagttaaaaacttcaaaaaggaattgatttaataaattataattcatgcctactgtggaatagtatacaccatcaagaggaatgaaatatgtctctttctatgtacatggcaatgggttcatgatgtgttattacatgaaacaaacaagattgtatagtacaaaattctataaatttaatgtatatgttataaacatacatatacatattaaagttctggaaggaaatatgccaaaatgttcttcagaatgttagtaatgttaatctctatgagtgggattgcaaataattgctttttaaatttctttttgtgcaatttttttcagtaaactataattttataataagaattaaaaatattttccaattttggacaaaataataaatggaagcattttcagaatagatttattctatgaatgtaacaagttcagccagagacacctaatttgtatagtacagagggtggtcttgaaaatgttagtcatttaaattctgtacttgtcacatggattcaggaaacacaagcgttcattggacatttaactcattgtacatacaattattattactataataatttgtgcctgagaagcaaagcatgagatttagaatcagacagatttgggtttgaatgctagttctgcttcttaacagccaagtgactttggcaaagaatataacttctcaatccaatttcctaatatgttttctcatttataaaatgtgttttatacacatacttttcagggtgatcagagagcttataaataacacatgtttgattcatgttaggtattcaataaaatttcgctatcataaatattattgttaatttagttattaagtttattgactgtgatacttaaaattttaacataatggccatgaccatatttaattttttttggctgaaaatcaaaatttacttagggtgagggagaaaaaaagtccagtttagattcattatgtagcagatattttaaaattctgtgttttgtctatgtaaaccccacaaaataatttctctctctttttaaagatctgtcctttctagtgttcttcaatgtttcctgttcatcctcacttccacctgatgctatttcttcttaatccgaagaacctcccttttcattgcttgtagctcagcctgctgaagcaaattctctcagcttgtgtaaaaatgtctttacttttgcaggatattttcatttgatatagaattctacattgattactgttacttcttttagaactttaaagatgttgtttccttgtcttcttgccttcattgtttctggtgagatatcagccactatttatataaatgttttcttgtatactatatgtttctttccttctttctttctttctttctttctttctttctttctttctttctttctttctttctttctttctttctttttgaagcagagtctttcactctgtcaacccaggctggagtgcagtggtgcgatcttggctcactgcaacatctgcctcctgggttcaagtaattctcatgcctcagcctcccgagtagctgagattacaggtgtatgccaccatgccaatttttgtattttcagtagagaccgtgtttcaccatgttggccaggctggtctcgaactcctgacctcagatgatccaccctcctcagcctcccaaagtgctgggattacaagtgtgagccaccatgcctggcctatatattgttttccacttgatgctgttaagattttatttttatctttcatgttatcagtttatgatatgcctaggaatgattttcattatatttgtcctgcttgaggtttgcttaaattcttggatatgtacgttggtgttttcattacatttggaagttctgatagttgtatcttcaaacttttctttctttttttcctttttttgcttccttttctttcttctgtaataagactctagttagattgatgttagagcactagatattgtcccatagatattgggtacagttttgtttgttcctttgttttcattttccccactcttttttgtgtttcagtttggatactttctatttgacttgtctttatttcactggtcaatttctcttttgtgtctaggctgctgctaagcccatctagcaaactgttgatttctaaattatacttttcatttcaagtattttcatttggccgttttgtagacttcatctattggctcaaattcacccatctatttgcatgtattattcactatcacccctagatcttttagcatttatattataggtattttcaaatccctatttgataattccaacatctgggccatgtctgcatctccttctattgactctttcctctctttacaaagggccacattgtgttgatttctcatgtgtcttaaatatttttattgtatgataaacactttgcgtaaaagaatgaaagaggtggaagtaaatcatattttttggcgtttttccctttacaaagaagagcactgctggttctatgagaccttttgaatgggggtgggcagtaggaaagaaaaaataccaaactgacttgaagttgatctgtacgtgggctttactacagttttaatattatttagctcactactggtttcagatatctgtggatagaattgaaaatagttagacacatgtctggtggggcctccttagaattctaatatgtcattctggcctctgtatggctgcttctttcttactccttctatgcctgaatcctctatttcttacctctgagctaagtatgggagtagccctgggtctcgtccaatgagttacatgtccagtaaatgtttgtgtttcctacaaaaggcttattactttctagaatttaattcatttagttttttctgtgcgctctacattttgattggttaaaaaataatgactttagggcttatctggcttgttttggttgttagattgacagcaaagtgatggtcccttacaactttttacatttaaagcagatgttgaactattataacaacatctaatttatacccctttttttctttggcacaactctgtctatacttaactctccaaccctctagattgtttcagctatggctggtcactgactctgaacaaaaaaggtgcatattacttggccccaaagattattttggtagaattcaggcatcgacgttttaattacctcctctaatttttcatggggattttcagcttttgtgggccctaatttatccctgactcttaacttttatatctgtttctttggtttgcctgaaatctgtttactgctaatatttaaaactgaaacatgtttttttataaatctagccattggatcttgtttcactaatgatcatgtggcatcgtttaatctcggtgcccccagcggctctgtttgttcagtttgtatagcacatgcatctcttgtgtttctttttctgtcagatacataatcatattgattagtgtataccccttataccctgagtccaaaaattcctcatccctcccgggatcttcaaatgatttaacgactttccactatctctcactttttgatgtggtctgttccctccttactcaacttaagtttcatggccagttattataaccacttcttttcatggaactggacttccctgccgttttttcttcacttctactatgatcttggcactaccacagcataggttaaatatacccaaagaggacgactcttcccaccttaaactcatgaccatgaacttcctatgtttcctgatgctgccctgtgatcattccatatttccctcattcattcactttcctgtcttatgccaactatttatacattttcctttctcattatcctgatcctcagtgattatattacctccaactttaccataaaaattaacaaaaagaataaaagagcttctatagatttccactgctatatttatccaccactggcataccacctattaatagatctgaccaagaatatcttgcctcatttttccccaatttactgctgtattgtaaaattttcttgtattaatggaacattttcaagggaataaaggcatgttgttatttttccatgaaaaattattcttgaccctcccccatttcttctactagccattgtcttatttatttgctctccttttagcaaaacttcaccaaagtatattcaaccataggagcctttaattcctcttttcaaattccaccatctacagtcagactttagctcaccactgcacttaagctacacttgtcaaatctctactcaccttcacattataaatctaatagttaatttcaagtctttatctttttgacctattaacatcatttaatggagttgatcgctccttcctccttggtatacgttcttcacttggcatctaacactccatcatctctctgagtttctagttgctgcgtctcagtttgatttactggttcctcttcatctacttgacctcttagtattggtaccccaagccttaagacttagctctgctcccgtgtctacagacactcactcccttaaagatcacctccagtcttatagctttaaatgtcatctaagtgacttgacctccaaatataaatctccccaccccagcctctttcctgaactccagacgactctgttacatgtatcaaactacccaaagtctccatttgaatgtttaatttacatttcaaaattaaacttactttttttcaaaatggaactggttttcttaagctctctcactttgatccatatactacttcttccatggtcttcctcatcacaagtgaaggcaatttcatttttccactaagacagagaaaaagatttggagtcatccttgtcaattctctttatctcatgttcaacatttttttttttgttttgcaaaatcttgttggtgttagaatcaaaatatatccagattttgaatccttcttagcacttccactagaatcatcccagtccaattcatggttgctgctttgccgggattactgcattgtcttttaactacttccaggcactccgctttattctcaacacagcagccataattgttctgttaaatatcagtcaagcatattacttctctgctcaaaatgctctattgtttctccattttaccagagtgaaaaccaccattcttactataacctacaagacctaactgagctaacagcagttacttctctggctttatttcttacatttgtttattttgttctccttgttttacacaaattggcctctttgccgatttttgactatgggaggtgcacttctgccttgataccattcgctgttctttcaacctggaacttttcacctcctgatatccatcaggctgactcccttacctgattaggtctgctcaataccagtttcttaaatacatctttcttatcaccccgtttacatctgcaaacaccacctccccactttgggtctcattatgttgctctattcttttccatagcacttagcatctttaatgtattatagaattgacttatttttgttgaatatatctgtttttccctctataatataaaagagaaagcaagattttttttatttgcattactcactgatataccccaggatccagaagattgcctatcacatggtagctactcaatacatattttccaagtaaatgaatcgatgggcagcttccatgcagcattaagcctgtgggtgtgtggaatgcaagaattgaagcttgggagcctctgcctagatttcagaggatgtacagaaaagcctgggtgtccaggcagtggcctgctgcaggggcataaccctcatggccctagaacctctattagggcagcgaaaaggggaaatgtggtgttgcagtctccactgagtcccctctaggacattgccttgtggaactgtgagaagagggccaccatactccagaacccagaatggtagccactggcagctttcaccctcagcaaggaaaaactgcaggcactcagtgccagcatatgagagcagccactggagctaagccctgcaaagtcagaggggtagagcttcccaaggccttgggagctcactcctcccaccaatgtgccctggatatgagacgtggagtcaaaggagattattttggagcactaaaatttgatgactgcccttttgggtttcagacttgcatgggggctgtagcctcttttgtttggctgatttatcccgtttggaatggaaatatttactcaatgcttgtatctgaattatactttggaggtaaataactgggttttgattttacaggctcataggtagaagggaattgccttgtctcagatgagactttggactttggagttaatgctggaatgagttaagactttgggagactgttgggaagggataattgtattttgcaacatgaaaatgacatgaaatttgggaggggccagaggcagaatgacatggtttggatctgtgtccccatgcatgttcagttgtaatccccagggtggaggtgatacctggtgggagatgattggattctggaggtggatttttcatgaatgatttattgtgatagtgaatgagttatcacaagatctggttattttaaagtgtgtggcacctcctcccactttgctcctgctttccacatgtgatgtacctgcttctccttcaccttctgccattattgtgggcttcctgaggcctctccagaagccaaacagatattagcactatccttcctgtaaagcatgcagaactatgagtcaactaaccctcttttctttctaaattacccagcctcaggtatttctttatagcaaagcaagaatagactaatacattatcctttgttactgatgtctaaaaatcttttttaaaaaaattaaaagcaagtatattaagacagtaaaggaataaaaaatggctactccataggcagagcagccccaaggactgctggttgcccatttttatggttttttcttgattatatgctgaataaggggtgggttgtttgttagttttccctgaaaggggtgggcaattcccagaattgaggatccctccctgttttaggccatatacggtaacttcctgatgttgacatggcatttgtaaactgtcatggtactgatgggagagtatcagtgaggacaaccagaggtcactcttattgccgtattggttttcgtgggttttagctggcttctttactgcaatctgttttatcagcaaggtctttatgacctgtgtcttgagccaacctcctatctcatcctgtgacttaggatgacttaccctcttgagaatgcagcccagtaggcctcagccttattttacggagcccctattcaagatggagttgctctggttcaaaagcccctgacaattaccccctcctttttaaaagaaagctcttaatcttaagagttgtagagggatgaagatccatcttctctaacttcttcaagctgaataggggtgatgatattcctgcctaacaattagggtctcttgtctttgggatagagaggaactcaatcagaaaatgctggtatgtcaaggtccattcagaatacttgagttctgacaaaagttgatacctggaagattaataagtatttaatttaagaaaacattcggtaagcttatcctacacaaagagtataacagcaatacattccgcagcagtaaagcaaaataaataaaattatcacaactaaactaaattagaagactttccatgaactgggcaattgttagaaccaagctaatatgtggttgctagtaaatcccagtatgtgcccagaattagaatattgatccagattttgacattgcccattcattttggttttttttgaatagtagtcagagatcacttggtggtacacagaaataagcagagtctgtctaaattacagaaaaaaaaccttaaacacaactaatgagactagaatctaataacaggtgtaccatagtttttgaagcaattctttttcttttcagtctctcatttttactaaagacaaattataatagaatcgatttgtgcgcaaaaatgagctttagtcttatacttggcctgattacttgtataaaatgctaaaaaataactatttttcacataggattttaaaattggctttgatggaactttgttccataaaaaggaatctcagataagacctttttaaagctgagcccagccctgggtttgtacaatcaaatacctatgagttgggttaattcctttactcttgaggtcctaagatatcttcgggcccctgagtctatcagaaagtgacattctttacttatcacaggtcaggaaccctgtacagggcatgtgtaaacaaagaatgtgaccagttttcccaaggggtttttattggctttataagtcaagattgattccttaaaggaaagcacaccattccagtgaaagtcttggtaaaataacaaatttttccaattgtgtcctgttacaaaataaaacagatgcttattgcacttatgcaaatatctattgtcataagttaagaatactcacaaatagtttctaaattctgaagaaattaggtagaatcaaatatgccccaaattttgtttacaggagtaaaatttactcaattgttaaaaagctgtaaatagcttaaaagaaaagttgccttggctctgatagcaaaacaaaggatcagcaacattttaagcaaaaagttttaaaagattacttcagctatctattattcagcccatgcagttaactcttgttcagcttgatattcatgaacatttcagctctccatcagtactgaaagttttatcctctcttctaatgtcacaatcttcaaagttattagaaacgtgcattcaagagcacctgtcaaaatcctatagctgactctaaacttactttttaaagaggattaaaacaggtcaacaattttctatggatgacaaaaagttttagaacgacatatattaaagccacaattgataaagaaattttggttagttctgtgacatacaatgattttactgacaattataactattactgataatgtacactaagtcatatcagaattacaggactttcccataattttggaacacaaaccaataacatatttttacaaatacagtccaaagaaagcaaagaccatttcatatttttctatgcttcctgtatgatatttataccaaataacctgaatatgccattttggactttaggccacctaatagctaagagattaattaggtcagaagaagacatactttgtaattttattttggaaagcttgtcaaatattaaaggtttaaaacactggatatcacaaaatataattccaggtcatcataagtcattcattaggccaaaataataactcaaaaatatttaaaggggaaaaacctttactcattaatagagggaagacttagatctccaaaccatctgtctcttttctttcctttcctatataaaatttcttttttagaaacaacctctttgcatagttgggaatatggctaattccacatgtccccaggccttatctagaatctaaagtctccaaagtaggtaaattgaacaattttcaaaagtcaaagaagcagtttctgaccttaaagcatttagtaaacttaatatgtgacctgcctaatttagaccaaatgtctttattttatcaataatttttaaagctgtttttatttcccaaacattcctaaagtcacatgaactaaaagtgattacactttttacttttctgacaaaatatttgatttagacacttattatttttaaaccgattaatcaaagctcttttatatcacatatgcagcacatataaatacacagacagaaaaagatccagtaagatttttcatttttcggtttcttaactggattactggcttcagggtggagccttagaggaacagagccaagaatgcgtgaaatttctaaagcctaataagcaggcacagctggaaggcaaactagatcttcaggaattaagggttccattttaatagcagattctggatcccaaaaagagggaattagcccatctcccatgggagtcttacctctcagtggggagtgggggcatttccataacttctaagtgaccaagagcatgcttctctgatccaaatgtgcaaagagccaagtattccataactgccattagccattctcaaaagtgtatttcctacctagttattgcataccaaagctctttcctaatgtaaagtgatttctgatacccccaaaagtaaaaaacatcagataacgcaatgcgaaacacaagacagccttagattttgagagggatctatccatttccaattcctgggatttcatgaggaaaacagatgttttttctcaaaatggggtctgtggtgctcctttttttcccaaggagtcccaggctgttagaacttaaatatctgcttttaattaagctgacttttaatggtactgctgtttttaaaaagtcctcttaaatttcttattacctgactttagccaggcgaaactgtcaataattctggcttttgaactttatcaaaggtaacctcccaggtgttcagagaaaggaaaattcaagacagaccattgaggggaagagaatcaacaaatgttcatgcgcatatcaaaccagaaaggactcattccctaagctgggaattgaaccctgaacctgggtcaccattgtgaaaagaaagcctcagctactgagctactcactgggcagtttccattgctcttcccagaaggagtctagagcagcagattttgagcttgcaaaggttttaaatgctcaagataattttgtagagctaactatgacatgaacccccaaattcctgttttctggatggtagagacctagagaaagtaccgccatgtggtcacaaggtcaagctcccaaggacataactagccagtttgctgggccgtcttgaacagtaggcttatggggtcctaagcttgtgttctatcctaaggtacccctctttctaacagaaatatacaggaagacaaattcacagtgcaaagtacaacagattcactgtagcttaaaactagcctcacaaatcctttttcacattaatcagaactttacagaggagataaacagtgatttttaccattctttgaactagtttgcacagagagaaagagagaggacagaagtctcactggtaagaaattcttacccttttgctggcatgccaggcttctgggttccctttccctgagcagtcctagtgacccagcttgacgcatcatagccctgggggccaagctgcaacacaaaggaaaattgtctttttttctgtcctggccagagcaaaatatgtgtgacatagacattagccactctgctcagcatccaatatcaaactaacaaggctcaaatttgcccctggttggaccctgtcatcattaatccaacctctgaccagaagtttcaacatgtggtctctgggcaagatggtcaccctgagtaagagaaaaggtaagaaagggaaaggagagaaagaaagaaaagcattggctgcatacagcagggtggggaaggcaaaataatcaaggataccagagaaagaccctcccattgcgcaaaagttcaggctgccgcttgaagggatctgtcatgaagggatcttttccagtagtcccattagctctcaaacatcccccttttgggaggaaaaagctccccaagtcccacattcacatgcatgcctaattatgtcacccacagccatcagcaaagagggcaaggcagattaacccaacgagaatagcagttaatatctcgtattgccaaacccattattagctgagagggactttactgagaggggcctgaaaccccctaaatcttaggaaggactctaaccttcttaagttgggccttgaatccatgttctgtcaagtgtccttgtcttttattaagaggggcctttaaccacctctgtcttaagagagactctaacgcccctaaattaggcctctaacccatttccatcctttacccaagcaaatgtaccccacttacccagagtcagccaataagtgctgaagtctatttcctttgggtcaggggagtctcctccgtgttgtcccttccatggttcaccagaaagatgttaccagaaagaggtccagatccagaccccaagagatacattaaaacaaagcaagttttccttttgaacttgtcaaaaattccatcttgtaaaggatattaaatgttgctttaagctgaaccttgagcaaattaggtggtttgtgtgaccatacatgtatgtggtggcttcttgtttgcaacttcaaggaacaagtattaatagttcagtgtatgatgttgatttgagttgagcatttgcagtttggataatcttaaattttgacagacactagctgtggagactctttctgttactaaatccttttgttttgaagctattgccattcgtctttctcttgtcctttatattttttgtctgtttctttaagcttttattggaaatgtgcataagtaaagaattacttgtgttacttgccaagcaatgcacatttcatagttttaaatctgtaatcagcaataaaaatcctaaaatatgtatctaagaacatcttaaaaaattctttctcactcaagaaagaattcaaggtgagtccatagagtaaagtgaaaccaagtttattaagaaagtaaaggaataaagaatggctactccgtgtagagcagcacccccaatgtctaaaaatcttaacaatgataataaaagcagaaaacatatggtaattttttggcataaaacccttactgcagtgagcattaaaaacaaataaactgctttggttcttcattctagagacatcatatttaaaaacttagatttcattatttgattttcattttgttacaaaataaaatattcttagtgtcacactaaacagagatcagataattaacctgaccccatgatgcataattttaattttaatttcaatttgagttcttaatagaaataatgaaaggctgttatcatattttggttgaatggacacagatctatttttttatggtaccacattgagaatttgtttttttacatatataaatctattaatggtattgtcaaaatactgtcttttttttttttttttaagatgtagtattgctttgtcgcccaggctggagtgcagtggcatgatcgtatcctagtgcagtctcaagtaatcctcctgtcatagcctactgcatagctgggagtacaggtgcacaccaccatgcctggctaatttttttttttttttttttgtagagatggttcttactatgttgtccagtccagtttgaagcaatcctcctacctcagccacccaaagcataggcatgaaccatcaagcccagctagtcttttaagctttgttgttttgaaaataatgaggattattactttgatatcatattagaattttttctaaaaatttaacaagaaattatctttagttctgtataatctgtgggcagctatatctatttataagcatctatgccaattattactttacttctagttgtaatttaaatttgttttagttttcaaggacacagctagtcttaataacttgatttgtttttatttccatttattgagtttagcatttataataacttaaaaaaaattttatttcactttaagttctgggatacttgtgcataacgtgaaagtttgttacataggtatatgcgtgccatggtgatttgctgcacctatcaacctgtcatctaggttttaagccccacatgccttaactgtttgtcctgatgctctctctcccctccccacacctgaaaggccctggtgtgtattgttcccctcccttcgtccatgtgttctcattgttcagctcccatttatgagtgagaacatgtggtgtttggttttctgtttctgtgttagtttgctaaggatgatggcttccagcttcatcagagtttctgcaaaagacatgatcttattcctttttatggctgcatagttttccttggtgtatatataccacattctctttatccagtctatcattgatgagaatttgggttggttccatgtctttgctattgtaaatagtgctgcagtaaacatatgtgtgcatgtgtctttctagtagaataatttatattcctttgggtatatgcccattaatgggattgctgggtcaaatagtatttctggttctgggtctttggggaatcaccacactgttttccataatggttcaactaatttacattcccaccaacagtgtaaaagtgttcctgtttctccacagtctcactagcgtgttgtttcttgactttttaataattgccactctgactgaaatgagatagtatctcatggttttgatttgcatttctctaatgatcagtgatgttaagctttttaaaaatgtttgttgactgcattaatgtcttcttttgagaagtgtctgttcatatcctttgcccactttttgatggggttgttttcttcttgtacatttgtttaagttccttgcagattctggatattagacctttgtcaggtggatgggttgcgaaaattttctcccattctgtaggttgcctactcaccctgatgatagtttcttctgttgtacaaaagctctttagtttaattagatcccatttggcaatttttgcttttgttgcaattgcttttggcatttttgacatgaaatctttgcctatgcctatgtcctgaatggtatcgcctaggttttcttctagggttttaatgattttgggttttgcaattaagtctttaatccatcttgagtcaatttttgtgtaaggtgtaaggaaaggttccagtttcagtattctgcataaggctagccagttttcccagcaccatttataaaatagggaatcttttccccattgcttgtttttgtacagcttgtcaaagatcagatggttgtagaagtgtggtgttatttctgaggtctctgacctgttccattggtctatatgtctgttttggtaccagtaccatgctgttttggttactgtagacttgtagtatagtttgaagacaggtagcatgatgcctccagctacgttctttttgcttaggattgtcttggctatatggactctttgttatttccatatgaaatttaaattagttttttctaattctgtgaagaaagtcaatggtagtttgatgggaataggactgaatctataaattactttgcgtggtgtggccattttcatgttattgattcttcctatccatgacgatggaatgtttttccatttgtttatttcttctcttatttccttgagcagtggtttgtagttctccttgaggagctccttcacgtcccttgttagctgtattcctaggtattttactctctttgtagcaattgtgaatgggagttcattcatgatttggttctctgcttgtctatttttggtgtatagaaatgcttgtgatctttgcacattgattttgtatcctgagactttgctgaagtcgtttatcagcttaaggaattttggggctgaaacaatggcgttttctaaatatagaatcatgtcgcctgcaaacagagacaatttgacttcctctcttcctgtttgaataccctttatttctttctcttgcctgattgccctggccagaacttccaatactatcttgaataggaatgatgaaagaagggatccttgtcttgtgccagttttcaaagggaatgcttccagcttttgcccattcagtataatattggctgtgggtttgtcataaatagctcttattattttgagatatgttccatcaatacctagtttattgagagttttaacaagaaggggtgttgaattttattgaagcccttttctacatctatcgagatgatcacgtgattttgtcattggttctgtttatgtgatagattacgtttattgattgtgtatgttgaaccacccttgcatcccagggatgaagccagcttggtcgtggtggataaggatatgctgctggatttggtttgtcagtattttattgaggattttcgtattagtgttcatcagggatgttggcctgaagttttccttcttttttttttttttgtcatgtctctgccaggttttttgtatcaggatgatgctggcctcataaaatgagttagggaggaattcctcgttttcaattttttggaatagtttcaaaaggaatggtaccagctcctctttgtacctctggtagaattcagctgtgaatctgtctagtcctgtgctttttttggttggtaggctattaattactgcctcaatttcagaactcattattcgtctattcagggattcgacttttcctggtttagccttgggaaggtttatgtgtccaggaatttatccatttcttctagattttctagtttatttgtgtagaggtatctatactattctctgatggtagtttgtatttctgtggggtcagtggtgttatcccctttgtcattttttatgtgtctatttgattcttctctcttttcttctttattagtctagctagcagtctattttgtttgtttgtttgtttgttttcaaaaaaaacagctcctggattcattgattttttgaagggtttttcgtgtctctctctccttcagttctgctctgatcttagttgtttcttgtcttttcctagatttttttatttgtttgctcttgcttctctagttcttttaattgtgacactagagtgtcaattcgagatctttctagctttctgatatgggtatttagtgctataaatttccctcttaacactgccttagctgtgttccagagattctggtatgttgtttctttgctctcattagtttcaaagaacttcttgatgtctgctttaatttcattatttacccaggagtcgttcaggagtaggttgttcaatttccatgtagttgtgtggttttgagtgagttttttaatcttaactctaatttgattgcattgtggtctgagaaactgttataatttcagttcttttgcatttgctgaggagtgtttactaataactttttaaaatatcagtgatttttccaggtaatagacatttatggctttgaaatttcaaagtatgtttaaacaaaaaaattcatcaacaacctcctcccacattctgcatttacatttatcattatcatgtgtgttcttatacttttattattagattgaaaaatatacaattgccattcttatagattaaaaatggtcaaacattggctatttcaaatagttcaatatgtaagtatctcaaaataatataacacatgctgttatctttatgttgttagtatttatgtaagtgctcatatatatatatgcacatatataaaaatacagagtatatcttcaatttgcctttttcataaataatttttctgagaattacccattttgatattttgttcattcattttagtttctctattagtattccactttataaaaaaaagtatggattatgtatttgtttccatgtggagagttagcttttctctttatataatttatagaagattgcaattaatattttgtatgtctccttgtgtgcatttgtgagaatttgcacagaaaaagcacagtgaaaggtatcataggcttcttaagtattcttatcttccattttgatatatcgccaaactgttatctaaagtggttgaaccaatttgccttcctatggcaacaggtaaaatacccatttgcctgtgttatcaacatgttttgttttccaacatttttgccaaaatcatgagtataaaatactcccttattttcgttttaattttaatttctttagtaactattaaaatattgaaacatatggcatttgagttttcgcctctgtgaattgcttgttctggtatatctttcattaaattttccattgcatttccttgtcagtaaaagttacacttataatctgcattttacatgttttaattatattgattgtaaaaatatttccttcagtggtttgacttttaaaattttttgtatttttggtctgtcacacaagagttttaaattttaacattggcgaatatatcagttactttttatggttcagatagttttatatcttacttaagaaattctcttttatcatgatatatattgccttctattttttctgaaattaatttttgtataatgtgtgaggtagagatttaattttaacttatctttattggcacattcttgtcccactgatttttattgaacacacattatttcctcactgatttttaaagccacctctactgtatctcaagctccaatttgatggtagtgtgtttaacatcttgtttcagaggtcaatttgattaacttcttgccaaaagctatagcacttgattatcttttgatatcttgcagtggattccttcttaccagccttcttcagctattgttaggtcttactcctccaaatgaattttaggatcagtttatataaaaatgtttattgagattttttattggaattgaattaaatttatacaacagcttagggataatttatattgttatgctgatttttttcatccatgatcatagtatatcattctatttatttagatcttcttttatgtcttttagtaaatttctataaataaaatactcataacttataataaaagggataaatataaaatttattcctaggtatctcaaggttttggtgctattgtaaatagtatcttttattaaattgcattttatatttattgctgatataaagaaatattataaattgttatatatcattcttatttccaacaccattttggaacacattaattcgaatatttgactatagatttatttgaattgttgaggtagaaaaccatgtaatttgcaaataatatatttatgtcattctaattcttatggattttacttcttttctttgtctgattgtgaggtctagacattcctttaacaatcttggaaaaaaaagcagtgagagcaagcatcctcaacttgtcattgctttaatggaaatggctttacattttttcctttaaataagatgtttgccatatcacgttaaaaactttcccacctattcctaattgtttagggttttctacttgtatattatgtatttttcaagacatggcagatttaatttgttgagatataattttcatgcctatgctaccaagtgagattggtcctgtcgttttcctttctcttaatgtccttgagaacatgtttcagctctcccatttatgacctgttttaccttgggcaaatttcttaatatctatatgcttcagtttcctcatctttaaaattagcatcaaaagaatatctttccatagtgtttttatgaggattaaataaaataatatacataaagcacacagaacagggcctgctactcagtatgcaatagttattagctgtcattgtcatcattaatattaagatattttaaaacacttttcccctaaaatacttagagtactttgatgcatatcctaagatctgtctctggctgctatttctggacatttctttgttgtaatatttctggtagctcttacttgtgactgtgaattgtagacatttgatgcccacagactattcagctctttcaacttctaccttgttcctaaggaaatctgaatcaattcatcagggtctttcctaaagaaatttgtcgaagttatccaatccaatgccacgattatatttcttcttgtatgattgtgtttttgttgtttgtcaaagaaatttttgcccaagtcaaggtcacaaagaattttcctgtaattttttctagctatattatagttttaggttagttctattatccatattgagttaaacttttacataaggtgcatgatatgttttcaggtgctttaaaaaacataagatatccaatattccaggaccgttcttggaaagaagagtattctttttccatttaattttctttgccacttagttaaaatacagtggactgtgtatgattttattatcagcattttcattgctactgaaatgcagtaggtatgcaattgattttcatgtattgatattgcaacttgcaactttgctgaactcatttataattcctaatagattttagtagatttcttagagttttctatgtacaagagatagttttacttctactttttcaatatggaaagatttatttcttctgcttgcctatttgccctgtctggtaactacagaaaaatgttgactagaagtggcaaaagtggacattgttatcttgttcctgatcttagggaaaaagcattttttcaccactaaatatgatgttagctgttggtttttcacagataccctttattagatgaggaagttgtcttctttaatagttagttgctttttaaaaattttatcatgaagtgttaactttgactatgtagctattaagatgatcatgacgtttttgtcctttatttttccaagtttgtgtattacttgattacttttcgtacattgaaccagccttgcatccttgtgataattccacttgctcatgatgtatgatcctttttgttagtactgtatttggttcactagaattttgttgaagacttttgcatctgtattcataaggcatattggcctatagttttcttttgatgtctttgatgtttttggtattagggtaatactggtttcatagagtaatttggagagtgtttcttcctcttctattttttggaagggcttgtgaagtaatggtgctacttcttctttaaatgtttggtagaattcgccaatgaaagcatctggtcctaagcttttctttgtggaaatttttaaaaaattactaatttgatctcttttagtggtatagatctattcagattgctaatttcttcttaagtcagtttacatagtttgtgtgtttcttggaatttgtctattttatctaggttgtctaatttttggcatacagttgttcatagtatcccttatgatccttttttgtgactgcaaagtcagttgtaatttcccttttttaattcctgattttaatcattagagtcatctcttttcttggctagtctagttgaatgtttgtcaaatttgttaataatttctaacaatcaacttttgttgtttttcttgttgtttttctattctctattttatttgtctgctcaaatctttataatttcctttcttctgctagctttaggttgagtttgtttttctttttctagtttcttaaggtagaagattaggttattgatttaataaatttctctttaaatataagtgtttacagctctaaatatcactttaaacactacttaaatcccataaagtgtgatatgttgcatgttcacttccattaatctcaaaggatttttaaatctttttgtaatttcttctttgatcattagttattaggaatgggttaattttcacacatttgttaattttacaaatttgcttctgttattgatttctaattttttctattgtgatccaagaatatactttgcatgatctcagttattttaaatttatagagacttgttttatggcctaacatataatctatcctggagaatgtaccatatgcacttgagaagagtttgtattctgttgttgttgggtggagtgttctgttggtgtctattaagtctaattggtttataaagtcattcaggtcttccatttctgtttgtattctgtgtagttgctctctccatgattgaaagtaggatattgaagtctccactattgttgttaaatggtgaatttttctctttaaatctttaaatttgtcattttactgttgttagacacatacatgattataattgttttattttcctgatggattgatatcttaaaatattcttgtctctactaaaaattttgtctaaagtctattttgtctgatgttagcataggagctcaagctctcttttggttattgtttacgtggtgtatctttcttttcattcttgaacattcaatctatttgtttcctcgaatgtagagtttgtctcttgcagaactcctatagggggtcatgtttgtttgtttttccattttgtaaatatctactttttgattgaagtgcttaagccatttacatttagcacagtgactgataaggtagttacaatgtcactttgctgttggttttttaaaatatgatttatgtcttctaaatttctctattctttcactgtcttctttgggttaaaaagttatcttctagtgtataatttaatacccttgtcatttattctactatgtttgttgcccaggatgttatcattaacatcttaattcataaaaatctaattcaaattaataccaacttaattttaagagtatgcaaaattttgcacctatatagtttttgttcactctgctttcttttgtgccgttattgtctatggagattttttacattggatgcccatcaacacagatatataattattgctttataaagtcatcttttaaaacaaatgtgagagagaaaaagaattacagtaaaaatacatttataatctttttaaatatttacctatttaattacctttacaggtactctttatttcttcatctggattacattgctctctaatatcctatcatatcagccagaaggacttcttttggtatttcttgtagagcaagtctgatagtgataaaacctctcaatatttctttatctggaaatgtcaatttatcctgcatttttgaaggagagttttgctagaaaaaatagtttttggtgtacagtttttttttacgactttaaatatgtcattcttctcccttctggacgccatggtttcttcacaagaaatctgtggttaatcttattgaagatcccatgtaggagatggccttttctcacttgctgctttcaagattttctctttgtctttgtctttcaacagtttgatttttaatgtgcctagggtgtggatctatttgaatttatcccacttgcagttcattgagcttcttggatgcatagattaatagttttcatcaaattttggaagtttttggtaattatttctctaaatattctttcagtccttttacctcttctctgaaactcccattatgcctatgctggtactcttgatggcgtcccacagctttctggggctttgttaatttctcaacattctttctctttctattgctcacactgaataatctcaattgacctgtattcaagttcattaattatttcttctgatcatttagatctgctagtgagctcctctagtgaatttttcatttgaaagttttctattttctatttattttttctttttttgatgaaatgaggtctcactacgtttcccagggtggtctcaaactgctgggctcgtgatcctcccacctcagcctcccaaagtgctgggattacaggcatgagccaccatgcctggctaaaaattttctatttcttttctcatattctatattgtctaaagcatcattgtcatactttgctttagttctttggacactttgttttgttttgtttttagttatttgaacatatataaaatagttgatttaaagtctttgtctggtaagtttaatgtatgagcttacaattgacccatttccattgcccatttttcttcccctgtatattgtttgtaggagtttctttgcatatgccatattctttgttgaaaaccagacattttaaacacatagtgtagcaaatctggaaatcagattatttccctttccagagttgttttgttgctgctatttgtcactattactactgtttgcttgtttagtggctttcctgagctaattctgtgaagtctgtttctttgtcatatgtgataaatgaagtcattgtttgctcatcttagtagtcaggcaatgactgaacagagaatttcttaaatgcctagaaccaatacattttccagtctctggtgagagatctgtacgcatgttgcagaatgccatcaacactgaggcagtttaacactctcctttagtccccacttcctgcttgtgcagagcctcaaagtcgagctgaggtgagaccttaggactttctcaggtctttctttagcatgcgcatatacctgagcacatacttagccttttgcatgttcataatcttgtagattcgcaggcattttttaaggatttgcaaagcgtttatggacatgatgtttcacatcttctccttttaagtattttggattgtttgttgtttcttctgactgttgttactgcctgggtcaactgcaatgttaagcagttgccagtgattatttttagcaaataattgttttaaacaaacagagtaaatgctgtttccagtggatgaactctgagtcaattcaagccttactagtggggctttccatggtacttccaggcagatcgaataatgacaatcatctgaggatagagctttgaaacagctccactcccattctgatcctctagcagtaactaggctgctggttttcaccctgattgcaaactgttcattttcagggcttccagagagtggcagagaggagtacgggaataggaaagctaaaatgccatagaacatgttgttcttaccaatattcagtcatttaaaaaataaacactgtccacattgttgcaagtctttgctttatttccagagttctcaataagttgatgtgatattctttgccagtgttcccattgcttttatggaagacagactcttccattgttttcactctgccattgctgatgtccttttattcgtttcctcaatgtcttatagtttttacctatatacattgccttgctttaatagatttataactaatatttcacattttcagtgctaataaaatagtatttaaaagttttaatttccattggttaatcactagtatatagaaattaaattattactcatttaacttctatcaaacaaaattaactaattcacttgttatttctaatagcttttatgtacagtcatggaaattttctgagtagataattatgctatctgcaaatgagagtttatttctttccttctgattgttgtgacatttgttacttagccttattatctgtttttaccctgatttatatgttggattacttagttttcccatttgactaattttgttgtgccacccagttgtaatgcataacaacttctttccagtcatcacctgtctattttctgactagacagctatgaggtctttcttgtatgagtcatgtctatttccttgatcaatttatataatttagacatatctttgccatatgaatatttttcaaagaagaatttttatggaatgtttatcccaatgaatatctgttgttaaaaaattggcaagtagcaaaggaataagtaaaatttatttctatggctgtccttgaaatatttgatagtattctcacctcaaatcataattcttttatttgggatggatgattcacattaactctaggtctttagaaaacttgctgtaactcttttttatgaagaatttcttcaaatatgaattctttagcaatggatatgattgcaagctccaaaatttaaaactaaaatggtttttaaaggttataaaacccagcccctttattttatagataataaaatagatttcattatccccctgcagcagagcttccctttagctattattaaaatatagggagtgaattctaatttatcagcattgaaaggtacacctccacttctaataccctggtctgactgccaacatttttcacacatatgactgtaatatcctcctaactggcctcttggcttctactcttatcttcctatattctagtctcagaacttttgaataatcctgagatcacatcactcctcttctcaaaaccctccaatggcttcccattttactcagaccagaaatcaaatttcttacagtaggctattagactttgtatatataacaatttgtacctccatcctcccctctcccccagccagctacttgtctgacctaaccttctaataacctccccccttttattctgctccaggatgctagctccttgcacctcctctaacatgccaagcatactgatttagaggtctatgtgcttattaatgcctgcctggaacattttgcccctagatatacgtatgactcattcccattcccctgtcaatgccacattctcaatgaggcctctcttggacataacatccccactaaaatctagccatgctctccaacctgctctaatccttctgtttttcataaaatgtattgcattctaatatactatatgaatttctcattcattatgtttatctacgtgaatgcaagctccataaaagcaagggtattttgttgttgttgttaactgattgtacttttggcactcgtgaaagtgcctggcacataataggcttccaataaatacttgtgaatgaatcaatacgtaaaagaatgaagccaccctgacatttaaagccatggttcaggctttagcaacatcacagtgttcatcagttttgctgtctttcagttatggtaagtctttcaaaattatgaatggctagcccctgtttgttatgatctgggttctttgagataaaacacttccctagaggttatataaaatattttagacaatattttatcctgagaaagcaaattggataacatgaaatgcaggtaatttctttttttctccttgatatctcattatgttggcaaaaataggaaatgaagactgtcagttttccacggctgccatgcaaaagtactgcaaactgggtggcttctcccagaaagagaatgcctaggactatagcggggcacagaaagttccccacaaggagtatttcaaagctgagacattaggggctgtatgaggcagaaaaattggaagcagaggcaaaatgggaaccttagggctgagagagcctgaaggttgtggggcattaaaaattcatgctgtagattaacagtgtggggtgtaaaggatgctaggagaggaagaactgagcatggttagggatagttgaaggtaaagaaaaaacgggacacaggcccagcttccttgacaacattatctcttacctcataaataaaatttatgctatgaggagtgactttcctattcgtctttcctattccccaaataaaagcataggcacacaatggctttgctgtatttgcatgtattcttctcatctttcttctaagaatgacatgtccatctttctaccattccctctttgtttaactttagatcctggatccaggtcaattgatcataaatcatgttgcctggatggccaattaactgaaagaatattttaccatgttttcttatttcttgtaactaattataaattttagaacaatttgtgttggaaatcttctaaagatttctgcaaagttttagtagatttagttttgtcttcataacaccacttggaggaataattctttgcacttgtgccagctgcctgttttaggatagatagagtagagaaactctccctacgggaaagtcagagcaggaggctgcctagagcacatcttcttgtgggcctcagctcatggggtatgtggaagactgagactaatgggtagaaagagagagcctataagtgtatttttcttagactacatcagctgagaatacactaatgaagaaatatttttatatgtaatattttggttattttctcaaatatattatttaatataaatataacatgtaaatatatgaatatacacaaatatatgcatacacacactcacacacagacacatactctttttaggctcctaagtctcacactttgcttgtgagtttcttcctgattctgagatcactatctcagactacttcgtgtgctaattctcctctccatgttttatttatcagccatatcctcactctgtcccagtttcctccaagcaaccaccaaggagcagcagaaaacataaatcaaacattctttaaaactctatcaagacagagtgaaaactgaatagttaaaagaaaaaacacattgggaaaatggtcatttgatgattaaaattgctccaattttatttttttagaactattgaaataaacaattattgaaataaattttgttattaaaaatataacaaaaaacttggagtcggtagtttttctgctttattctgtctccactctcttgggcttatttgtctcagtaagttctgaaaaaatatttgccaaacaaataaaataataccatgtggattaaggttgatagctacatttgccttgaaaggtcacctaattcaaagtagattggtctttgaacctggttttcttagaagattttccctgaggcaataaaattctgagagtgaactatgatactattgatatatgtgaatgacacagaacctacaagtaggaagtcttcgatgagtcctcatttggagattttctagaacagacattaatttaactttagagagaacccaaacagatagcctggagcttggagctataacaggtgggatgtgagagtgaggaatcttccttttggcattgcaaatactctggaaattgcaatcagaagcagatgacaatcaaatttagggctgatgagataatatatctatggagttataaactagagagaaatttgacttgggaagggacttctggagaaagccatgagttcgatcagtaaataggctggccaaagtattcactttgacttaagtcctacagtgtccatggagataactatgattatttttgttattaatgtggaattagcaaactagagattgatctgtaaaagtttcaaagggcagtgacataaatatctttttaaccttaacatcttcaaaggaatatcacttaaatacttgtcaggtattgcttggtaaacagagacttcttatattatgcacatgtgtgtatttgcaggtttagagcagtttgtcggaagaatgcaagattttcgattataccaagtggcacttacaaacaggtaagcagatgttgcattgtaaacctcaagaaccgaaaggataaatgctgaattcacttaaataagaatactatgtagattataccattttttatctttataccatttggcaaacttcacctaattaatgtttacagtgtttgctttggcttagtctatggttgttattcactagtgctactcttgaggaactccttgtaatatgaaattgatcacatttttcctaaggatattctgtaagaaaacttgatatttgaacattttataaaacttgggatacaatgcttaaattttctatatgaggtagtttctattaacaatacttgagaaacttctacatctgccttttttaaattggtttgttgactttatacctactagagaatgtagaacaataaacgtgattaattattttgatacatgggaaattctcaagagactgatctattagacttggagacaagaagaatgagcatttgaagtattgtgatatatttttctattttcagtgaacaaataattatatagactcaggctagctttaatgacattatttccttatcttgagagtagatgggaaatctttcttagggcttcttaaaagcacacagaattttaaaaaatttaagtgaaattctgcttaggatgcctttgaactttcttcttcagcttatgatatcatggtataatagtatattgttgtatggatgagttgatcttatttacttctattaaaaatcaaaaagaagaatgttcattcatatttcttcaaggcagatataaattagtgtggtgggtttccaaatgagaagactagcccttgtaaatttagaagcattgcttttgatgtggttcttagtccatggcagatcattaacaatataaacattctttcttaccaggctatataatcaaggtatgcctcagtaaagggtgccatggccctggaacacagtgttaggtgtatttactgccaaaagccttactatattttagatcacctttgtctaaaatgctgaagggcaatgttgtagtaattctttgggaataaagtttttccttgggagtgaaagattttatactggattctatactggtagcttttggtcccattcaaaacttggtatcagttgaaaagaattgatgagatttaaagaaggtatgacttcatgtgatttaatgaatggaaaagctgcctgactccttcactgctccactggggtctgagaggaaaagcctggtttctctggtaagaccttgattactaattttggcctacctgaaatgtctgggaaggtgctatgtggaagaatgcctataaatagaatgactaattctggtctagaacaagtatattgcccctaatggaaaaattaaatatatctacctggaattggcattctttgactgttggcagccgccatatgatctgaagccaatgaagcattacaggatgtcaggatctgtactgatgagtcacaggaaaccattgacaaatggccttggcctcagtccttcacttaaaacagaagcagataaaatgatacttgctttcgtacttctttcccatggatgaactgaaaacattatctataactctcattgttctccatatattattgttcactctcagtagttagtttagcatcctaagtaaatgtgatcatttctatattatcacaaatagacacggtaaaatattgtggtatttaaataagtatcttaataatcagacaagggcttatgcatgcttcttgatataaataaaaagttaatattaaaatgtgtgggttttgatatacattttatgataatgaatttgtttatttggccaaaaataagttttattttatgtttcatgcatcaaattattaaaactaaatggatactcatgaaagcactaaacgagtgacattcatttgtaacgactcctagaagttctattactgttaagctctttgtccttacagtctccctcttgactcccacagagagattctggaagtcttctctggagatcttctcagattgcatgcccaatcacattgccgttgccctggcagccacccgcgggtccaccctttggcacagcggtactgcattcctaatgatgcaggagacacagctgataatagagtgtcacggttgaatcctgaagcccatcctctctcttttgtcaatgataatgatgttggtacttcatgggtttcaaatgtgtttacaaacattacacagcttaatcaaggagtgactatttcagttgatttggaaaatggacagtatcaggtaatgagaaacgataaggtgtacattaatttcctgtggttattgcaacaaatgcccacaaacttcatgtcttaaaacaacagaaatatattccctaacagttctggagatcagaaatatgaaatcaacatgttggcagggctacattcccttaaagattccagaggaggatccctccttgccatttgcagctcctggtggcccttggtgttacttggcttgtggcaccacaacttcaatctctgcctccattttcacatggtgtccttccttgtttctctgtgagcatcaattatcccttttctttctcttatataaggcccaccctattagacccaggatgatctcatattgacatccttaattatactgcaaagaccctatttacaaataaagtcacatttacaggtttggacagtagtacttggacatatctatttgggaacacaattcaacccactacaaggtgaaaactgaactaggcaattgaaccttgcctcaataaagtagtgtattataatgtatacaataaaaatatctaaaagacaacatgtaggaccttatgtttgagatttgtatcaaaatgatatttatgaaatgttgaaaataattatttttattaagtagcaaaaattaatacaaactaaggtgctttttctaaattaagaagtctctatatatgacatttatttcatagaagtaatgttctttgtttatgtctttatttgcatgttgatttataaaatccttgagcaaatgaacagatacacaattatagaatatgttgcttttaccacagggctatgaagtttctggatgtctaatacatatttgataactataattatgatgaagtgagccaatatatttgaatctaataattccatggtttgatatatactgatggttaaacttaaaactttaattacattaattaactttccattttcaggtgttttatattatcattcagttctttagtccacaaccaacggaaataaggattcaaaggaagaaggaaaatagtttagattgggaggactggcaatattttgccaggaattgtggtgcttttggaatgaaaaacaatggagatttggaaaaacctgattctgtcaactgtcttcagctttccaagtatgaatatttttaaacaattaatttaatagactgattggttattaataatgtacaagtatgctagctctctaggctggtggagacttcccttcaccaccaacttccttgaggcagattctcctaagtcttatccctaaattgggcttaaaactatgtttaaagttcttgtaaaagacattagagtgactcttatttcaatctcactgatgtttcacaatctgattttcagattgtttggcaagttatctatgtaaatagaattttcattatgttttcaaggaactgttttagtgtggctttctatgataatcctgtattgtttatatatgaaatatatggaatatgcttttcctagaatgaataatttaagcttttattgatactgtgtagtaatttctcaacattttgatttctgttttgccaaaaatgtgaatagattttcatgacatcgaatttctttcattaacagttttactccatattcccgtggcaatgtcacatttagcatcctgacacctggaccaaattatcgtcctggatacaataacttctataataccccatctcttcaagagttcgtaaaagccacgcaaataaggtttcattttcatgggcagtactatacaactgagactgctgttaacctcagacacagatattatgcagtggacgaaatcaccattagtgggaggtattattatgaattttgttttcaacaaggtttttgtcatacttactgtcttaacagcacattaagatgtcagagcaagccagatttcaagctttacattttgaaatgatttcatactctaagattttaggggaagatctgtatgtgagtcttttctctatataacattgttatatatatatatatatatatatataaaacgtattttataaataaatatatatatatttatatatacaggaattgattttcaaaagctgttgcttttagaagctatgatactctgaatctgacttagaagtgatttatccaatattttacttgatttgttctggaatataattttcaaatattctcaaaagcaaagagatggagctgaatttggagttgtaactatagcaccagagagtttttaagtacagatcttgatctacctgagttcatagtgcacagttccatgggtaatacttgtttttctttagtggaaagatctgatatgccctaagtagtttataaatgtctgatcataattgagaacatgactcacaatatttaaaaagaaatgacagctgcaaacctaggcagcatactgtctaatatagaaatgtacatatagagtatatttagaatggattgttctggaggaatgataggccttgtgaataaaatatgtctttaaaagcagaccaaaataccagtatataagcattgtttgtttgctaagtcatagcataatgaacaaagcaatactattaaatattcatcatctaactttggaaaaaaaaataaaaaaattgaaatatgttaactgcattctgcagtttattgtcaactttatattcttttttctttcttttttttttttttttgacaggcttttgctctgtcacccaggctggcatgcaatggcatgatcatggctcgttgcaacctcgacttctgggcctcaagtgatcctctcatctcagcctccaaagtaactgggactacaggcatgtgccaccatgcccagctgattttttttttcactttttgtagagatggggttttgccatgttgctcaggctgctctcaaactcctgacctcaagtgatctacccgcctgagtctcccaacatgctgagattacaggcgtgagccaccgtgctcagcctgaactttatattcttaactgtattttaaatagtgtagtaaatgccttcccttggtacgtggttggtatagatataaaaaattccatttccctttagaggttggcttgaaaattatctttacaatacacgggtttggatattggtgacagtccttctgacatttccagataaattaaaaacgtgtatggatatccacacgattaaggagaaactgattttgtatcaattaaatatacaaaaatcttccctgttaaattcacataatgcatatagtcctaggaccttaaatatattcacagttgagttggtgttccttaggagtgtgtgatgctcatgtttgcagatgtcagtgccatggtcatgccgataactgcgacacaacaagccagccatatagatgcctctgctcccaggagagcttcactgaaggacttcatgtgagttctattttatgcatggaaatctaaaaaaaaaatagtagagatggtgactataaattctatgaacttaatcttggcctaacaaatgaaaataaatttaaaaactgatatgaacttaaaatgtcaattattgcagattttttaagaaaaataacagccatcaattaagttgaaattgtagtttttaaaaataatttcagccagagaaattacaactgaaaccaaaccctaaggttcttttctcttttgtttttctttctttgtttcatcagcattatcatgttttataaaacaatttttaatgtgtttggatagcatggcactaaacaaaaaatagtttgattcttactaaagggtatttatacaaaagtatcaataaacaaaagcatcgttagatgaagaacaatgtttatgtatttatgtcaatcaaggttcatttattgctaatatcaggcattttaattaattgaaaatctatagtaaaatgatttatgagttatgttactttagttttctgtgacgatcaggggaattccatagttgaggtggaattttagcttcatctttagggaaaagaggtaagtggaaataaaatcaagaaacattcgttggtaggaatatctagcaacaacatcagaaatagctgatatgaaagacggttcagcagcagtaacaattataccaataatgagagtagataatatagactcttcagtaaatatgtttaagacaactggctgctaatttgcaagaaaataaaattagagctctactgattgtatgtacaaaaatgtatgtggcttaaacttttagtgaaaaataactataaatatattaaaataaagattagaattctatatcttaagttgagggcttttatcagctaagcaaatgaaatacaaacagaaacaaacatctggagctatgaaggaaattaatgacatattctgttatataaatatttaaaattctacacagtataagggttaacataaatgtaaggtagtgataaatgatggattgatagaaaatatttgcatcatgttaacaggtaaagagttaagattcctaacacacaaacatttacaaaatattaagaaaaatataacagtctgataaaaatgagcaaatatatgaacaagcaatttacaaatgaacaaattgtaactttaataaacatataaaagattacccaacctcagttttaatcatattcaacaattgtttttaacatttcaaattagcagaaaatataaagattggtaatatttagtacttgtgggaatataacctttaacacatcactgatgggattgccaattgacacaatagttttggggaaaatttgtccacctctactaaaattaaattttcaaatatagtgaactacattatataattgctgtcattctgaaaagcagttcttcaatgacaagtgtatggaatggtgtattagtctgtttgcattgctgtacaggaagacctgagactaggtaaatataaagaaaagaggtttatttggcttgtggtactgcaggctatacaagcttggtgccagcatctgcttggtttctggtgaggcctcagaaagcttacaatcatggcagaaggcaaagccagaagccagcctcttttaaacagccgtgtctaaacagccatgaactaacagagtgaggtctcactgctgaagggaaggcacttcatgaaggatccacctccataacccaaacatctcccaccaggctcacctccaacactggggatcacatttcaacatgagatttggaggggacaaacatacaaactatataaaatgcttatatttctatcattttgttacataaatatgggcttatatgttagtgcattttagcttttcagatggtagcactgtctcatacactcatgtatgacttgtgaacatctctgcctcttggaccttgccctacacttgtgttttagttagttacttcacttctctgtgaaatttattttaggatattatagagcatcttgctttttaaaaaaccatctgtaaaggttttggcaaattccatttctgtcttctgattcttactctgatctaatttgcttttgactgtaacattagtgagaatagttcaatggtaagaatattatctataatgcagactttctctagcacattcaaaacgtagtcccactcctcagtttcaactaagagtctttgatttagttatggcctactttctttctttctttctatgtgctcagaccaaaactttcatgttctaatttagatattcttttgaatttattttctagatcactactttatatacatctagtcctcaccattagtcaatacttgctttaaaagaagaaatcttttatggttttcttttggatttctaatgcctagagtctttgcatttgatttcattagtatattatgaggaaaaatcttttagaagaactgattttaatatgcttgattgtatggcttatcatattgtcacagaaatgaaattaattggattaacttgattgatttattcttcactgagccataattgtgtgtttaaatttttgccaattttatttgttctagattttaaagttaaagcaacatttattatatttttctactgtcttcttttgatcccttaagatggacacttacttccttataatcagtgatttctttcattaaccttgtcctctcctccacaaagccactaacaccccaattaaaaaatgctttgggatgaatttagcagggcaccttgaactgaatatgtctagtatttgcaagctacagtttggctaataccttcatatgatatgttcttttctgagcttctcttgctttctgttgactagtcagtcggtattagtctctctcatttgcttgtgacgtcctgtcttgttttatctttctgtctttaattgctcacagttaagtgttggatattttctgattcttggatgatttcatgcttccccttaaaaatagagccattaaatgaatgaaggctcatgattggtttcagaagacaagttgggattttcagacttggtctcaggtggtgaatgttggattatgaactagtgaattaattaactataatttgggttgagaatacattttaatgcttcttatttagaccttaagtaccttttgaaaacaaaaatgaaaaactaaactttttttgttattttcctccttgacatattttgatagtttatgaatttagccataaattttaaaaagcaacaaatataatttacttagcaaactttggcaaatgcaaatgcagctgcagggaaaaagtcaatagactgttaagttgaatgatttctcagtcctatgatattttcaataatgtgttgaaaatgaaaaatgattttatagaaacattcataggcatgacattctcctttgttaccattcaaagtattttaatacaagtagagacttacatatctgagaaaagtcgtcttacggtaatttgaaaatatacctattctaatgcttttcttgttgttctactttttaaaattatacgttttaatataagccattcacttcctattgggatccatgttctttttaagacctggacataatccaaaaagaatgtcttcaattccacagtgttatgctatccattaataatattacttaataaacagggcttttgtgaattatattacagacatttggcaaacagatgaaaatgtaaggactgaaaatatgccaattcttggcaattgtctttcctatgagaaagtgtttttagtagaaacaaaaatgaatgaagttgagaaaaggtgaatggtgaattcaggggcaggttcacatatttagccatcctaaggaattttccgtacaaaatactattcatttgtttataaggtcaatgtcacaaattggtggctcacaggtagaaacagtgtttaaacagttttaatttaattttctgcaagagttttcactttaaaatatttatttattcttcaatcttttttatttatttatttttttgagagggagtctcactctgtcaccgaggctggagtgcagtggcatgatcttggctcactgcaacctcagcctctcagcttcaagcaattcttctgcctcagtctcccaagtagctgggactacagctgcacaccaccacacgcggctaactttttgtatttttttttttgtagagatgggtttcaccttgttggccaggcaggtcttgaactcctgacctcaagtgctccacctgcctcggactcccaaagtgctgggattacaggcatgagccaccactcctggccctcaacttttattttaagttcagaggaacatgtgtaggatgtgcaggtttgttacttaggtaaaggtgtgccatggtggcttgttgcatagatcatcccctcacctaggtattaagtccagaaaccattagctattcctcctgatgctcttccccccacagcccccaccatccctaagaggccccaatgtgtgttgttccccgacatgtgtccatgtgttctcataattcggatcccacttgtaagtgagaatacgtaatgtttgattttttgtaccggcattattttgctgagaataatgacttccaactctattcatgtccctgcaaatgatttatatttctggtaatacacagtaatgggattgctgggtcaaatggtatttctgcctctagatctttgaggaatttccacactgtcttccacaatggttgaactatttatactcccaccaacagtgtaaaggtgttcccttttctccacaaccttggagcttctgcacagcaaaagaaactatggtcagagtgaacagacaacctatagaaggggagaatatttttgcattctatccatctgacaaaggtataatatccagagtctagaaggaacttaaacaaatttacaagaagaaaacaaccccattaaaaactgggcaaagaaccctgagttagcgagttgttgccaggggaggacattaatgtcttcttttgagaactgtctgttcatgttcattgcccaatttttaatggggttgtttgtttgagaacagttctcaaaagaagacatatgtgtggccaacaaacgtatgaaaaaaagctcagcatcactgatcattagagaaatgcatatcaaaaccacaatgagataccagctcatgccagtcagaatggcgattattaaaagttaaaaaatgacacaaatttttaattcctcacttctcttaatcagaacatagtctaacactgtgtccatttcctgccatcaacaactcactgattcagggtgacatttaccacatttacaacagtatcactcttgggcttgctacaacattcactactatgtatatccttatacatgggcgacatcactttggtgaactacctggccttgaaagactcggagcttcttaacctcctaaagcaaaactgatggatagattgagacactagaagctagaatacatttttaattattctgagtagagaaagaccagctgttcattgctatattcattgttaactcctatttcttttacccctttataaaaataaaaactcacaaataaccgaaaacaactcaagaaaatctattagcaaagacactgtttactctgagatgaaattaaagccatgcttactttttttttaattacatttttgacatctaaaaacatttaccttggggagcctcactgattctcctctgcactctttgaccaggaactccgatacatttttgtattgtactggcaattttaaggccttgactttaatgtatgatacataccataaatacttcactcatagagaatacttttagaatacttgtcgcatttctttccaagaatgaaaaaaaagcagtaaatgcttaatttactaggctcactttagaactgatttagggtgaaacaaatccaaaagcctagatgctattcattaactttcatacaaagttaaatatttcaaagtagaaattagaaatacatggtattgaacttgcatgaatcattatatatctcacaagttacaaacatgttatttataaatgtttaatttcatttgaataaaaaatagccactgttacttgcatttttaagtaaacttttaattttgagataattatagatttatatacagttgtaaaaaataatataaagacaatttgtgtactctaccaatttgtcccatggtaacatctggcaaaactagtgtttttttctttttacatcaaaagtgtgatttgtgtacaataaaatatacccacttaaaaatatatagtttgatgagttttggcatatgtgtaccctgtgtaatcaccatccctgtctagagatggaatgtttcactctcccaaacgttctcttatgcttctttgcagtcagtgctgtctctgaacccccaatcccaggaaaccaccaatcttatttctatcaatacagattagttttgcctgttccaaaatttcttagcatagtgttatttggtatgtaatattttcgtacataggcttttaaatcccacctcacccccacttttagatcattccctaattacatgtgctgttagctttactgcaacatggtatctctggcccacttaatcagaaatccattataagtatcaaagtgtatatattaagctcataggtacataatacaagctaggaattggaagcctgggtttatctgtcaactaacatatttgcaaagctataatatatttattacttctttttcttatctagtactttctttacttgatctaagagttcaagtgttgaatagaatctagttttaagaaaagtgttgtcagttgaaacttgaatccttatgagttgtctttttcctttaataactacatttacctttcggggctctggccaagagtgatgcaatgatcagtgtctcagccaagcattggcacttcattggctacttagctattctttcgtcattttgtgacatcattacctgcaagggtagccaagccttcacagagcaatttattagtaaccatgaacacttcttattctttggctctaacttatgacccttttataacattaatcatagatcttatgaattaactacaatcaaactatcagtataaatttttgttagcattataaatagcacagccagcttgaaactttttatataataagccttcctaccactcaataatttgaatggtgccaacatcacactctagaatgcttattatataaatgaatatttctgttatttttgaaagattcctttagagcaccaaagtccaaaagtatgaatcatcatgactaatttgtgtcatatttatattatatatcaggctttaccactgcttattttttctctgtttgttcgcagattttaccctaaatatattttatttatattttaattattgtaatgctagtaaattaattcatttttatataactagcattcacacagttcatattataggatctacatttgatatatgtttagtaagtcaaggtaaagaattttctttcctcactgacatgatgatattattaatctttgaaaaacacttgtactagttctttccgtgagataggtatgtgcataaatgcttttaaaatataagttgaaaacatgaaaaagaggttatgagcatggagataaattaagacagccttacagaagaagcaaatagagatagtgaaagtataaacatagtaaaagaaaagataatatttgaagggataagagtaaagaattatctaaaggtgaggaatgacatgatttttctgaatcccaagtaggctaagaaaagtaaatgcatacataggtataatataatgaatccaataatcaccaaagaccaagcagccagaaagacagaaatctgataatcaccaaagacagaacagcatcctaaaaacagccagagagaaaaatacaaagtgtaagaaattaatttctaagacactactgatatatttctcaacagccacaatgaaagccagaagacagcagagtagtgcctttgaaatgcagagagaaggcaaccaagaaatatggaattgtatttgtagtagtaccatcaattagaaacaagaaagaaagaatgcatttttagtttacagatatatatatcaatattatcaccagcagactctcaataaaagaatttttcgagaatacttttcataaggatatataatgtttccagaaaataggcctggtgtgaaggaaggaattgtgagcaagtaaaccagcaaatatgtggataaatatagaggaaaatttactgcgttaaataaaaataaggttatatgtaagaaagagtataaaaagtagcaggataccattaaatggtcattaaaaatagcatttaaagggaaggggtaaactccaacttcagctccctctagccattctgttgcaccttggggtaagaagagcagttactgagaaatacttgtaaagttcacagccaatgagcacagggctcattaaaaactgaaaactaatcctagaatcatagaacaggggtccccaacccctgggccactggtcagtagtggtctgtggtctattagaaaccggactgcatagtaggacgtgagcagctggtgagctatcattacttcctgagctctgcctcctgtcagatcagcagtgacatgaagttgtcataggagcataaaccccattgtgaactgtacatgtgagggatttaggttgtgcactccttctgagaattcctgatgctttgaggtggaataccttcatcttgaaaccattccccatgtgctgccctcacacccagttcgtggaaaagttgtcttccacaaaaccgatccctggtgccaaaaatattggggaccactgccatagaacgctttccctcccctctcatcttaccaccacaccatgaaaggcctgtttgccagagttccctttactcagtacatcatgtctggatttcaacaaaaagttacaaagcacactaaaacaccaaaaacaaacaaacaaagaaacaaacaaacaacctcacagtttgaagagagagagcaaaaatgagaatgagactcagacatggaaaggatatggaaattatcagaccagaaacttaaagcggctctgatgaatacactaaaggctctaatggaaaaagtagacaacatgcaaaaatagatggcaatataagctgaaagataaaaattctgacaaagaagcaaaaagaaaagctagagatcagaaacactttcatagaaataaagaatgcctttaattggatcattaatatttggggacagctgataaaagaatctgagtttgaagatgtgtcaatagagactaccaaaatagaaaggtaaaaagaaaaatgactgaacaaatagagcagaatatctaagaactgtgagacagctaccaaaaatgtaaatacatataatggggaagaagaagaagaagagaaaggaacagaagaaatatttggaacaataatgactaagaatttttcatattccaaatgcagaaaaatcaaagttagggaaaaatatcttaaaaggagcctggctgaagggggaacatctagcctatgaaaaagcaaagataagaattacattctacttctcctcagaaagcatgcaagcaagaaaagtggttaaatagttaggtgttgacagaaaaaaaaaaatccacctagaattctgtatcttgcaaaattatcctttaaaagtaaaggaaaaatactttctcaaacaaaaaccagtagacttttcttgccttgcaagaatgttaaaggaagaacttcagagagagagaaaaaatgatacaggtcagaaaactcagatttatgtaaagaaagggagaacattagagaaagaataaataaaataacttttatttttcttatccttaattgatctagtagataccagtttgttcaaaattataataagaacaatgtatttcattattatagcatgtgtgtaagtgaaatgaatgatagcaacaatacaagacaccagagggaggaactaggaatactttattattattaggtactcatgccaccttttaagtggtatcgtgttatttaaaagtcaacttggaactctcgcatgacattattttgtcttgatagttcaagctccacctgcggttctcccgtcctccatgccaggtgtcaggggctgctctggatgttaactcttccgccccatgacttccagttccaaaatggcggcacagaaacaagctgccatgccacaaccccaccgcgcccctctcccgccaaaaagaaaaattaacaaatatacattgctgagattatcaccagaaattgtcacgatagtccagaactcaaatatgaagatataactgttcccagggccataaggaaatgagaaacaccaagtggatggtaagaaacctgactttcacatttgtagcactcgttaccccattttgcctgacaccaaatatgcagaagattttcctccaactcacttttttctacactggaaaaattaagattgaggtaaacaaccagcttccccagccattctgggttaccggaaagagacctgtcctatccatgcctcaacccactggaagcgtcatgagtgcctaaagggagacatattcctgaagataggcagagacaaagggggatgtaggtctgtcatccccagcctgggaaagtctgctctgtaacttgaccaatgcagacacaatgtcagagtagctgcttagcagcactatgatgcaggaggattatttcactgttctcctcggcacaaacccttaggcagccttcccatactgtcaggatattccctttgggacctctcttgttaagaagggcacaattggattgtttactgaagccaaggcgaacctgggcttaaagcgccccctatagctccctagaggaagcaatttagcagcaaagacatagatgtatgtccacaagaaaaacagcagtaggaaactatgatgtctccaaacagacaaagcagggaaccagggactggccctaacaagacagtaatatgtaagctccctgaccacgaattttaaaatgcagttttaagaaaactcagtgatctccagtagaacacagaaaaataattcagaaattcattagagaaatttaacagagattgaaattttaaaaaatctatcagaaaccttggaactgagaaataaatttaccgaactgaaaaattcactagtagctctcaccatcagaatggattgagcagaggaaagaatcagtgagcttgaagacagaatatttgaaaatatatggtcgaggagaaaaaaagaacacaaagaaatgaagatttcctacaatatatagaaaattattaatacctcaaaaggccaaatgtaagaattaatggtattcaagagggagttgaagaggaaggattagaaatcttattcaacaaaataataacaaaaaattccaaaatttaaaagtatacttggattagttataaatgtatattataagctttatagggcaacccccaaaaaagttttaaaaaggtatagttgatatatttaatacttacaaaggaaagaaaatggaaccatgtaaaaatgctcaactaaaaccacaaaaggtaaaaagtatatagaaaacaagaatagaaacaaagaacaagggcaatgaataaaaagtagtagatattaatccaactatgccagtaactactttgagtgtcaatggtctaaatataccaattaaaagagagagattgttagaatgaattgaagaataaaaccagctcattttataatgccaacattaccctgtaccaacatcagacaaagaaattacaagaaaagaaaaccacagaccaataactctcataaaaatagatgcaaaaattctcaacaaaatattcaaaataaaactattaagcaatgtgtaaaaataattatatatcagaaccaagagggatttatctcaggtttgcaagactggttcagcattcaaaaatcagctaaagtaattcctcacatcaacaggctaaaggggaaaaattacaagattatatcaataaatgtagaaaaagtatttgacaaaatcaagcatccattcatgatcaaaactctccacaaataaggagtagaggagaacatactcaacttaatagaaaatatgtataaaaacctagagtgaacatcatacttaaggataagaaaccagaatctttcctactaagatcaggaataagacaagaatgtttcctctcagcactccttttcaacaacgtattaggaaggaataaaaacaacaacctcatttcaaaataaggcagtaaaggagaacgaaagaaaaaggatatatagaaaatagaaattccaaataaataaacaatcacaacaaatctaaatgtgctgaacatattagaattatgagactgtctggctgaaagagaaaacaacatccacctattgtctgagcagaggctgaattagggcaagagaatgtcttaatcacaaactttacaaaagcaccaaaaacaccctattaagcaagatctataatatttttatgttatatttcaaaaagtcaaatgatttagaaatgtataattaaaaatcaaaattttaagtaaagacacattagtgttgcttgttttatggtcctgtgttattttgtaatgggagctgttgtttctaatcagtccataattcctacctaccagttttataaggttggcatgtacctgtctcatagaaggttttacaatcgtctagaaacagactaggcatgatgggacattatacacagctatttttttaaaactgtagagtgtttattaactttttccatttggctccaaagattggtaaatattttctagttgtatacagaggttcgtatttttcctttgccctcatgctgcaatgcagctcagcatggtacttgtgctgagggtgtgagagacatactcaaaaaacaagcacacttcaagtttgaaaatttaagaaagctagcatgagctacataaatattaggcaaaacagacattactgtttcattaaagaaaaagaggcttattgtataattataaagtataaaattctaagtttacatgcatctcataatatagtttcaaaagtataaagcagaattttatagaaccagaaagagaaattggcaagttctaccatcagcatagaagaatttaatacatctcttattaaaaatgtctttttataaaaagaaagaaaagctacatactagcagttgtcattagcaagacaacacatatataactgacaaaggtaacatttaaattaagcaaactatttgaaaaacagacaaaagaagtgaacaagtaattcacagaagaagccagaagtggcaactgaaatggtcaatatacatgtaaagacatgtgcaactttactggttatcagtaaactaaaaaaaaagaatgtgataatattttatactcatcaagttgtcaaagatggcaaaatctggaaatttcaggaactggtaagtggggactcatacaccacttatgggaaggtgctgctgcactatggaaaacaatttgcaaatgtctacgtggaacactttacagtagtggatatgaaggaatatagctatcacatcaacatgaccagacttctcaaacaatcatactacagaaagcttgttttagaataatacatacactgtatacacttatataaattttaaaatcatacaaatagaaagaagaaactgataaaaggataggaggcaggactaacttgcagctccccctcggacagacagagcagcatgtgaagacacacatcatgaacttttctccaagaactactgcagcaacataccaggaaagccacgagaatccacagatcctttgaaggaaatagattgctgctgcaggctccaggagacagccgaaaaactgtaagtgcccaaagtgtgaaagggggatcttccacccctgaacacatagccttcctggggaacctgaaggtccaggtcacaggtgatggatttggccttacctggagctgagacaaacttagagagctgaacaaaatataagggtaaaggaagcagggggaagagccctgtggactctctcagcccccaggaaaaccatttctgactttgtctcctagggtccttgggtaggactgccagtggaagtggggaaagaccacaaggagaaggaaacttccagatgaactctgtaacaatttcgactgaatgccaactttcctagcagaatctgggggtgagggtgaactgggagtgcagacacagcacagaagttgcatcaggcagggaggtgtgaaacctgaaacccctgcttgcttttccagtggggagacctggagcaggggcaagtcctcagccctgttcacccattgcctggaaataaactcagtgctgttgtggagagtattgtgggagtgagactggccttttgggttgcatgggagctgggtgaggcctttcactgccagctttcccctactttcctggtgacctgtatgatgtagcagaggcagccataatccccctagaaacataactccatcgccctgagaaccacacccccaacactcagagcagcttcagcaaggcctgcccaaggagagtctaagctcagacacacctaaccctgaccctacctgatggcctttctctacctgccctcgtagccagacaaaggacataatctcttgagagctctatggccctgaccaccgcctgagaaacttatccaggagactctagagcaagcttgtatcctccctatgctactgccgttgatgctctcttgaaagcgccacctcctgtctgaaggccaaccaacacaaaactagtgcaataaacaaaaatacaacaaaggaccctcacagagtctacttcactcccctgctatctccaccagagcaggtgctggtatccagggctaagagacctgaagactgatcatatcacagggctgtttgcagttactccccactaccagtctggaggctgctagctccactgggtggctagatccagaagagaaacaacaatcactgcagttcagctctcaggaaggcacatcctggagcacccacatccagggagcacccacatctagggaacacccacatctggggagcaccctgtgggaagaaagaatctgaacaacagcacttgagccccagatcttccctctgacatagtctaaccaaatgaaaagcaacctgaaaaacagttctagtaatatgacaaaacaaggttctttattatccccaaaagatcacaatagcttaccagcaatggatctaaaccaagaagaaaactctgaattcccagaaaaagaactcagaaggttgattattaagtgactgaaggaggcaccaaaggtgaatatgaactcaaaggaatttcaaaaatgttacaggatatgaacagaaaaatctccagataaataaatagcataaataagaagcaatcataatttctggaaattaaggacacacttagaaaaatgcaaaatacactggaaagtcttagcaatagaatccaacaagtagaaggaagaacaccagagcttgaagacaaggcttttgaattaacccaatcaaacaaagacaaagaaaaaaaaaaattaaatgaacaaggcctccaagaagtttgggattatgttaaacgaccaaatctaagaataattggtgttcccaaggaagaagagaaatctaaacgtttggaaaatctatttgagggaataatcaaggaaaacgtccccaaccttgctagagatctagatatccaaatacaagaagctgaaagaacacctgggaaattcatcacaaaaaggtcattgccaaggcacatagtcatcaagttatctaaagtcaagatgaaggaaggaatcttaagagctgtgaggcaaaagcatcaggtaacctatgaaggaaaacctgtcagattaacagcagatttctcagcagaaaccctgcaagctagaaggaattggtgtcctatccttatcctccttaaacaaaacagttattggccaggaattttgtatccagtgaaattaagcttcctaaatgaaggaaaaatacagtctttttccgacaaacaaatgtttagagaacttatcaccaccaagctagcactacaagaactgctaaaagcagctctaaattttgaaacaaatccttgaaatacaccagaatacaacctccttaaagcataaatctcacaggacctataaaaaaaaaacacaatttaaaaaaaagcattcaggcaacaaatagcatgatgaatagaaaggcatctcacatcctaacactaacattgaatgtaaatggcctaaatgcaccacttaaaagatacagaatggcagaaaggataagaactcaccaagcaagtatctgctgtcctcaagagactcatctaacacataaggactcacataaacttaaggtaaagaggtggaaaaagatattccacgaaaatggacaccaaaagcaaacagcagtagctattcttatatcagacaaaacaaacttcaaagcaacagcagttaacaaagagggacattatataatgataaaaggactagtccaacagggaaacatcacaattctaaatatatatgcacctaactccagagctcccagatttagaaaacaattactactaaacctaagaaatgagataaacagcaacacaataatggtgggggacttcagtactccactgacagcactagacagatcatcaagacagaaagtcaacaaagaaacagtggacttaaactatgacttagaacaaatgtacttaacagatatttacagaacattctacccaacaactgcagaatatacattattcatcagcaggtgaaacatcctccaagatacaccatgtgataggccacaaaacaagtctcaatacatttaagaaaactgaaattatatcaagtactctctcagaccaccgtgaaataaaattggaaatcgactcaaaaaggaaccctcaaaaccatgcaaatacatagaaattaaataacctgcttctcaatgattcttgggtcaacaatgaaatcaagatggaaattaaaaaagtcctttaactgaattgtttgatatagtgacacaacctatcaaaacctccatgatacagcaaaggtggtgctaacaggaaagttcatagcattaaatgcctatatcaaaaagtctgaaagagcacaaatagacaatctaaggtcacacctcaaggaactagagaaacaaaaaccaaacccactcttattgacttaataaggaaattaaaaaaagtatgctgagattgctaagatctattataataatgaatcttctatctgtgaaatagtgaaaaaaaaagaaattagtgctagatttgctgtcaaaccacaaagtgcaaaagttacggccgcagtgctagataagtgcctagttcagattgaaaaagcattaaatttgtgactggaagacatgaacagaaaatatgtactatatggaaccaaaatatgtactacatagtacacatagtaccaaacccagttgctgtcacttggcacatagagatctggcatctactggaggtcttcaaatgtattccttgtggaaaacaggactacttactatactactaaattcagatattattagcggagtggaatatatatggcagtatcttgtttctaagttgagtggtacataaaatggtacaattctttttttaattattcataaatttatttttaatatttcagtataatttcccttaaacacaataatatgattgattaatctatcaggaatgtatcacctatgtaaatactcatgctactactaaagacagagtggaggtgactctattcacaatggaataaccattactaaattcatgattactgtgtacatttatagttttactgtaaagattgatcatttgctagctttagtcactcaacaaatatttataaatgccttctatgtgtagtgcattatgctagagtacagccattatgtcttgattacagatgcaagtatttgaaaatattgaaggaccttcatttgtgaaattcaaaaaagattccctggcagacaccaattactataataaatagagatgacttcagtgcaaacaaatgattcaggctaacaattagtaattaacaaataatataaatagtatagacattttaaatcttaaagaaaaatttaaatgcagcaatacttaagaaagggttttttaatttactaatgtagtaatcaagtctaatactacaaaaaatttctaatatgaaataccctttatatttaaataatcaaataccttgtataccagttgactaagtttagaggaatcttaaatattaaaaaacatcaataacgccttatacttcttagtatgtgaattcgtatttgtatgatgtatattattttggagagttgcctgtaagcaccatattaatataatgaatgaagcttttcttcattgaagtcctttgtaaaataatgcaggttatcctgaataaatatggtctctattccaggccatatttcctggaatatcaatagggttaaattattatggttgcaataaaatagaattgctttatcttgtccactatctacaatcttgaataaactttaaaatcctccttctgttctcttaagggaacgtggtgtgtccccatgtgtcttttttatttagtgccctgaacaatccataaataagaggaagaaggaataaagaaggacagagatttcaaaggagaaatcaaatacctaacaacatgcagtattgaaaattaacaaataagaatgcaaggcctctcatgcaaatggttccatctcattcaaccactagacataattacttctgtattcacaaggcctacagtaaggaaatactgtttaaaaaaataggctatcaattatatttatatatagacaacatgtagactgaaggattatccgaataatcctgcctagagtttctgtttttctaaatataggttttatgtcacgtattacaatttgtttcattggataattttccaatcttccatttcactttacccatagaattagactaggcattacttgaattagaatgtttctaaaaatagccacttatattaatagttgaaatattgaagtaactatgtatgatgtgtttgtcgtcattgtattgtcacctatgtttgatcagtattgtccaacagtattagtagttatttattttatgctattaatttcagtatctagagagtgagtaagtacattgtatctgtgaacactttaattatgtaagaatttctagccaagggaaagataattactgaaaaagggatatgtcattgaaggataaacacgtggcatttctgtcttctcagtggtaaagaatagtatttgttttggcttttccaattgaaattacataatctgtaggtaaaaattcacaggtgaagtattattgcatttgcctttaaacctttaatgttactattcaattaaatgctagtcacattaaagtacagtcctgtaatgtgtcataaatgcaatgagtctgttaggacattcactcacacattcaccaaatatatatgatcacctcccatgtgcaaagcacagagccattttctgtctagattctctatgtagttgggcactttatctgtgttcccctctgaaatctatcactgataataaattaacaagtttgtctaacattacctttgccatgggaacattagagctacctagggacacttccattggaaaaaagatacctgagtacactaaagtttttatgtttataaagatgatttctctacctagtagacaaatcacagtgaaactggatcctttgaattaccatggaattgctccagccagaggaaaggggaagccttgaatagagccggaggacaattactattattagagatttaggctcttaacatttccaacatagggggctggtttctactgatgagaaagggaaaatgtacagattttcagagggtctgcaattcattcaggccatctgggaatagttaaaaaaattacctcttttattcagtgagcagtactgtaacagtactaaaaagtgatcattttataatctttcactttgaagcagattgtctttctctccttctcacataggcagtgctgcatccatatctctaaattttatagccaggagtggaataactacatcttttggtttctagggctttgctgtccagtttagactcagcagaaagtaaagatggactgagccagagtgactccagtcaacacctctctccctcgaatactattttcggtccctgaagccagtataaacatggagattagaagtgaggtctttgaaggaaaacatccagatatataaattgagtacctactatgttctagggctccttctaggcacttcttcaacatattgaagacaagttgttttcgatgactcattgtgatcattatgaacttaagcttccaaaggtcattgacactgggagctctcaggaccttgaagggaaattttctccctagcccccagccttttgcaaggacttcatatatctttgtctaagaggatatttttcttccttcttttttcaaagatacatagtaggcatttaagattgttgtataagtgactgaataaataaattgctcttgcagttaaattacttaaacttgtattttacacaagtttctactttctctgtaaatttgaaggtgttaagaaataagtaaaattgagtgtgtggcttgtcatggtggctcccgcctgtaatcccagaactttggtaggccgaggtgggcggatcacttgaagtcaggagtttgagacgagcctgggcaacaaggtgaaaccctgtctctaccaaaaaatacaaaaattagctgggcatggtgatgtgtgcctgtagtaccagatactcgggaggctgaggcatgagaatctcttgaacgtgggtggtggaggtttcagtgagcccagatagtgcctgggctccaacctgggcaacagagcaagactctgtcctttatctccaaaaaaaaaaaaaaaaaaacattgagtctatcaggagtggagttgataaaaatgctttggagactatgggttatctttgaaagattgtctttgctgctctgtaatggtaacgaagaaacactatacttcagtttaatgatccataagaaataactgtcattgtgtattattagaatataatgtaataaaataaatttcatcagtgtcttctagattcaatgactattcaatgattttcatacctgaacatgtcaaagtatttggctgcaacttagcggagttgattagtagcctttaagaagctatcaaaatgaaagcagttaaatgaatcagtggtaaaggtccttgaccctgatatagccattgtctaatctcataatttgggcattcagggacatatcgggggaatccagttgttacagaagaaaccgaaacataattgaaagtgacaaatgatcaactggagattgggaaaacatgaaatagaaaaccatttgcttcaggagctgcctaaaatataagatacacacagagttcttgattttaaatcaaactttaaaatcactggtagaaaaggcagttgaaaattatgagaattcaaaaatttacttataatgcacttaccaattattatttcttccattttgtcatggttatccttgtattatctgaaacgagttgttaagaaccaattatgggaccaagaatttaatacttcatgaaactttataatcaaagaatagactacaaagtattccttctgtctttgcaaaccatacaaaatgataatagaacagtatcatctttaggatcaaagacccaaataggcattggtgtgtcatttagttgcatatgtcttaaatcaaattttaaaacaaatttaggcatcatctctcaaaatctttgcttctgtatattaatcccattgttttggaaaaaatgtatattttttacaaatcatactctgtttactggtggctcaaaaactttttagcttacatagtagttgaaaagagaatcattttttctgcagatttttgctcatctgtgtgtaatttaaaactgaaacatattaattttcttaggttttcttagtgaaatgttacatgcaaatgatgtataattatcttgtaactatccatgcagttacattttatttgctctcaatttttaatacattagtaataaatgtacactgtggaaaaaataaagttataaactttatctgtaaacctaccacccaccggtaaccccagccaataatcttagtttatatactttcaggcattatattattgttattattagtaaacctgtctcatctgtctctatcttcttaaaattgcatatttatatctatagataagtccacctttatctagaatagaggattatactctgtatattatttttaacttgattttcaattcaagctgtattatgaatatatttctctatttatatttataaatgttagcctttttttttttaggaattggaacatcttaaaccactctcttgcttttgggcatttaatttgtttccttctcttcagtattatcaacaccccattattaaaacagaaaatctttatcaagcagctttaaaaacatattctcggacaggcacggtggctcacgcctgtaaacctagcactttgggaggccgaggcgggtggatcacgaggtcaggagatggagaccatcctggctaacatggtgaaaccccgtctctactaaaaatacaaaacaaattagccgggcgtggtggcaggtgcctgtagttccagctactcgggaggttgaggcaggagaatggtgtgaacctgggaggtggagcttgcagtgagccaagattgcgccactgcactccagcctgggcgacagagtgagactccgtctcaaaaaaaaaaaaaaagtattctcctaaattctcagtggaatttctgggtcctgtggaatgtatacatatgttgctcctcctaaaaggagtggataaactcctctcctacaagcagtgttctgcactggccctttctacaaattcctttcaccctggtattatcataatctaaaaaataataatttgagaatcaaaaaataacagctatgcttgttttcttcaggaaaacagaacaggttatccatatatctgcagggtttttttctccacaaaagaaaggccagccattttcaataacaagtagtttggcaggaccagaaccattccattgggtcactggtaaaatttgtctttggctttaaacattaaggcagccaggactgtgtctttggacattgatacagcatttagtccagtcttatttacaattaggctttttgataatggcttttgggctgacgttaagtataaaatctgaaattagattttttaaagattataatcaaaaagcaaaaatgtcttcctagaaatagcaaaggaatgcttttgctggatttgctccactaactcatgtaggcaatataccaaactcaaacagccagcagttgttttgtaaaagacaaactgcatctgaaatcagtatgacaggaccacagtttccatctcatcacttccaccaacttacatttaagaaagcacaacttgaataataaaaaccaccatagagtaaacaaattcttcaatgagaatgctttgaagtcaagagaaaaataggctcagggcattgtgttacagcaaaattttgcctttggcaaaagttttacgatggaatagggtttttaaaatattgggaatcaggtaaattgcatggctaattgaactggggaagacagcttaatgagctcatttctctccttcaaatccaagaagtcagaaggcaagttttcatctattctttcatttatccaattagaacatatcgtccccacacatagggctactagaagaagtaatagttatgtctgatggctcttaggaagtattgtcaatagataggacctcctctgtagttataactacagatgatcaaattaaccagaaataaattttggtcataaatttcttcttgctccactctgtaggctacctcctccaaagcagatcgtagaccagtgcatttataaatcacagaatcaccttttaatggttatagactatatatagcatagtgacagtcatatactgctggtgctggtcaaacttgagatcaacaattctgttggatttttacccctctcttccttctttttcctcctcttccatattctgactttcaggtttgagcatgtaataacttccaggatttgttttgggcattatttatatattaccacttatcctaagattattttgagtcagataaaagtaagacattctattaagttatcttcattttgaagatgaagaaactaagattcatagaagtaaagaggactctaggagtaactaactgtccattgtcattgttaatgttacttaacctctttaatcctctgtcgtgaatccaataacgatcaaagtagtaggcaagtttgctgagggccaactgtgtgacaagcactttgataactgattggtctttacagcaaccttatgagagaagtattattactctcatattatgagtgagaaaaataaggattaaagaggtacaggcaattactcaagaacacagggctagcaaatcaagaaacagaagttagatgtgagatattgtatcacccaggcctaaaagatgcaatgaaacaacccattttaaatgtttaatatagtaaccagagtatactctcatttgatgagagtatactcatcaaatgagagtatgcatttgatgttacttttcacagtggcctttttgcagttaggaaacagcagcaccaataatagaactaagctgtctgactcccagcctgtacctaaatctctaacttttgattttatgaaataaatttgatttgcagatgggcattgctggtgagggaaatgtaaagaggtcaatttccccactttaaatttttttggctaaagacccatagctgacaatattttaatggttgccacatattcttcttttatgaagtgagtttcattttatatttgtaagtggtttttattgcaaatcatcacctaacagtcaattctgaagactttccataaatgtcaccttgtttgtgaattgttctcattctgtctcctctctaaattccctcaagaacaactttctttggacattaatatcattattaattgtgaattgtcagctaacagcttagcaattgtctatcatgctcctaatgcatggatgatacagagaatataaagtcaataacttgtatttcctgaaagatacatatacagaagccaatcatttcagtagagtgacaggagcaagattgaggtattaatagagtactctgagagatgagaagcgggacaactaccttagcctaaaggtttgcaaatgattgtggggaaaaataatctttatcactccaaaaagaatattacagtgatattttaattgaccatagagtttaacttgaccattgtaaaatgaccaaaagggtgaattattttttaccaattattaaaaagtagcactacctgatataaacagtgtgacctaatgtttacattcttattattttttctcctttttgtctttttctctctccccagctaagtagaaaaaactcactttgttttcatgctaaaattttggaataccattaaacagcaacacactggacaactacattcttatgttttatcttctccctttaagattgttaaaggaagaaattgaactagtggggaaaagtaaatactggccaaaaaaaaatgcttttgactagtgtatgttccaatgatgattatgaaatatgtcaaactgttctaaaatactaaatatgtgttactatttattctgtattaaaatagaacaatagaataacctttgttgtcccaatatgaaaatagtttttaacaatgttaatataaaacaaagagcaaaggaccattatcttggataaacagagagacattactttacatggtttgactcccctgattcataatttaacatgtaactctggcatatgctgggcacttagggaagtcacattaagtatttcacagcaaatggagagtgagaaaaatgattttcagaaatcctggtatttacttattataaatcttgtcttgaatttattgtactttacatgaaatataatttgataaaatgtaattggtttcagtgtgtatgcaaaatgagaattttctgatcattcagatatcaaaattaactttataaatacaaatacatataattacctattaaaattctaaggtgtatttattttaataaaagtctttatcaaacctagataaatctcatttatgattataaatgtaaaactcctaaatttttttttacttggctttatttactattaatgatgttgggtttattaaaaaatgcaagcacagactccaattagcctactaacctattgtataatttatcaattcaataggtcaaacaattaaatcagaacatttaataaaattgacaatatttttttatttttttacaaaaatccatattggttgttttgaagtagcaatttcttcttcaaaatgataaaaattgtctatgtaaaatcaatagtcaatactataaaagctgcaacattatagacattttcattaaaatgagtaaaaagataattatgcctatcacactactataccatataaattaactattatgctgaaaattctggccaataaagtaggggaaggaaataaatataactgtatatttaaaattatgaactaaatcttcactgttttacaggcaaaggaaaattctaatatctgataaaatctttaaagtcaattaaaaaagagtatactaaagaaaaatgaataattttctcaaaaaggactatatctaaccaagaactaggtgaagattggcattactagtatccaaagacataaatactaaaacagtaattgacatattatctaaaatcaaaatagtgaagatataacaattatgggcagaacacaagaaaatggacattctcagatattgctggtgtgagtatgagtttaatttttctagaaggaatttgaccatatttaacaaaatctttaaaatgtttatactctttgataatgtaatttcatctcataattttcttaaggtaatacttagatatatatccactcccgatccccaaaataaaatggaaaaaaaaaaactaaatgtgtaatgattgcagaagggttgaatgttattttatgagaaatataagaaataatgcagcaaaatacatgatgtttaattatacaaaactatgtagtaatacaaaatatatgatttttaataacacaatacccatgtatattcataattttgaaaagaagaaatatatgcatatacaaatttgaaagaaattatctcatgttgacattttgacttatcatttgctagtcaaattaccagtgcttttaattttctacctcctgcctttgttttataaagaatatttttattatgtctatagttatactaaactcagttcagttgaattgttatttaaatctatggaaaaaattttgctttgtccataaattgtatttatattagaaagttaaaataattaattataaaacatatatccaggtttttttatttgttccagtacataacagacctattacataatttgagtaaattttgtcttacagttatacaggcagttctctccttacacaattctgatatgcatgaatatcagttatcatagtttagttaaatgctaacagtcctccaacaacgtaactcaagtgttgggtaacattgaatattactgtgagtaattacataaacaaacattgctgctggctctgcagtccacaaattaccacataaaataacagatgcacattgtgatcagtgaccgatcacgtttatttttttcagtatctgttggtgattgcgcactacacatttatcattcagtttatttatagaagagaagcgtgtggttgtgttgcctccttgtgagtgataaacccgagtgacactttacaaacacagatattcaaaaaagaagaggaattggacagcaaagaggaaagcactgcaaagaaagaaaatacttgaagtaaaattcagattgaacctaagtggagtcatagaagaaatagtcactactgaggtttgagagattctgaatacgtagccagagctacttagtgaaggtgaacttaacataagtgagggaagtgcttgccacaaatagggtgaagatgtcctggaggaagtgacacccaaacacttcacattagaggaattctcacaggtacttcacaacactaaaagcataaaagttaaaatgttggaagctgattcaaacttagaaaggagcgtgacaattcaccaaggcatagaaaagaagtggccgggtgcggtggctcacgcctgtaatcccagcactttgggcggccgaggtgggcagaacacgaggtcaggagatcgagaccatgctggctaacagggtgaaaccccgtctctactaaaaatacaaaaaattagccaagcgtggtggcgggcgcctgtagtctcagctacttgggaggctgaggcgggagaatcgcttgaacccgtgaggcggagcttgcagtgggcagagatcatgccactgcactccagcctggggaacagagtgagactccatctcaaaaaaaaaaaaaaaaaaaaagatgcttgtgttcagtgtgataagttataggtgagatgaaggcaagcactgttcaaagtacttttagtgagtattttacaaaggactaaaacaacttctccaagtttttaatgttttaaattacagagtactaaataaatggtcatttttactggtttatttctttacatttataaccagcattggagagttgttaacatgttgaagttttacaaagtcttagagctatcataacctttcctgttgattattaagatcactttgcatgtttgtaacacaaaggttaaacacttgaggggatagatgtcgcattttccaagatgtgatgattacacgttgtatctctttttcaaaacatcccatgtagcctataaatacatacacctactacgtacccacaaaaattaaaaattaagaaaaaaaaagatcattttccatggttcaagtttgcatggtcacttttacaattccaccctaccatgcccgtaaatatgctatttctgacttacgaaatatttttcaaataaaatcattgctgacttttaactcactgatatgtgctttacttctggtgaaaggcctaacatatcaataaaatgaaagaaaatcacagctttattttctttactgttctgatattttttgttctagtgtgatcgctgcttgcctctttataatgacaagcctttccgccaaggtgatcaagtttacgctttcaattgtaaaccttgtcaatgcaacagccattccaaaagctgccattacaacatctctgtagacccatttccttttgagcacttcagagggggaggaggagtttgtgatgattgtgagcataacactacaggtaagtagcaaataaattcctgagttggtttggaggcctgtgtgcttctatctacaatgcatattattttaaattatgttattgctatcttatttaaggatgtactttcatacctttaagtttgaaaatcaaagctagttcaccaaatcttcctatttccaaatcactaggtagttttcagaaatagcactctagtcttaaactatatcttttcaggaaaaggattttgttgttgttgttttgttttgttttgttttttaaagagttcacaccatttgactaaaccacaaccatatttagaataactcgggaatgcttactttgaacacatatccttaaagtaagtttccttttgtcccctttattgtcctttatgtctggattctcatgtggagatggcattcattcagatttggcatggacactggtagtctgagaatactctttttgaaaatactaattaaatggagacgatgataatcaaagtcctgttctaaaactacaaagcctttgactagtcattgaaaaataccatccttattttgaaaggcaagaaatggccaacatctgaatttgtgaaatataatagcatatatctgatgggtttcaaagtggtactcttaagcatgaatccatttatcggctgattattgataacttaaatatcacaagatcttgggtaggtgctggggacatgaagatgaataagacaatgaattttctgtctttgggttattgtacagtgggaaagacagactattgaaaggaatgattacaaagttgtctgatgattgctaagatagggcaaggacagtaggagttaaccagttgaaagattaggatggtgaactaaggcttacaattagggaaacattttgtgcagtggcctagaggagggagaaaaatgacacgtttgaaaaaccataagatgggcaaatggctggtggtaagagatattaggaaggaaggcaggacaatatcatagaggactctggagccatgataaagcctttggcttttatctaaggtcaaggagatgacacttaagggttttatatgggaaaggggcataatgagttacttgttattaaaagatacacctggttataaagtaaaaaatggattggagaaggttagagtggttggggaaaactagttagtgaggtgctgcaatagtccaggtgagaaataatgtcagaatacatttcagatggtacggatagagagaaatggatccaagagatatttaggataaaaaagtgagtgttttgtgagcagagtgtaggcaagggaaggaaggagagccaagactgatacctaacattacattctagcttgagcagtaggctcaacattggtgccagccattgagatagaaaatacaggaggattgagatgagggaggagatggcaagttctgttgtggatatgttcactcggtttctaagagacataggagaaactcctgggggcagttggaaacacagttctgaagctctttccttcaaggaaatcctctcatgatgctttagagaagatcagaatcacttacacatgttagtgacaactatgcttatcatggtttataaatgtgtattactcctggtattatttagttcagattcctcttacctcctagactgtaagagagctttgtgaaagagatgcaatgggtattgtgtatttagtttactactgtattacacagcacttagcacagtatttggtacatagtaatcacgcgataaatattcattaattcataaataaaagagagatttctggattggagatatggatttgggagtcaacagcatatgtaaatggaaatagtctagaaatattataaatcaatttaatttttaactagctcaatagccaatatctatcagaatatgagttttcatattattgattattgattatttctgtagtcttcaaatattggagaaatttcaatattttttgagcaaagtacatcatgtttaaagggggaattgatagtcttgagttctacttcagcttatttcaattatcttatacactagtcacgttcactttaaaaattccttgtagtttaggttttttattacataatatagcaaaggaaatttgtaattataaattataaactatgggaattacctgatatatctaatatgtcaggctattctagtatttagtatgaaaagtacttggtatctctaaatataatgaatttctatttcaatctttgaaatgaaaaataatggccactaacataatcatttgtttttaattgtgttaactacagaataataaattatattaagagaagtctcccattttacatgattgagttctagaaaaatatttccaatactacatacctgcttgcttcttactgtataagtatcatctaccacatatgtagaaatttctcctgctgtattgagtttagataaagtgcctggccccagatataaagttttaagtttaggagcaaactctttccaaatgtatgggcccctataaagcacagctttttagaagtgtggtattatataacagatgggagtttaatgaagtaaagcacagtttgtaacaggttcattgtttcatatgctctggatcactaaattggcaggtagagatgaaaggtgcattaaaacggacgttccgaaaattatagaattccctcaaaggaatacagtctttaattttgaattatgcagctgattttaatgaattagaagtcataatgcataacctttccctgatgcaggaaggaactgtgagctgtgcaaggattactttttccgacaagttggtgcagatccttcggccatagatgtttgcaaaccctgtgactgtgatacagttggcactagaaatggtagcattctttgtgatcaggtgagtttttctgagtatttaaggtaaaggattactctgtctgccagaaacttatttggatgttattccactagtagaattgaagactgcatttgccaggaaatcctctatgtgcatttgcatttcaaagagatggttgttcgtgtgcaactttgagtatggacatgaaatatagcactagttcggtggtcctttgcatataaaaaggcttattttagttttaattttacaaatgtcaaaaaatcgaagggtaggggttctaagtaaattggggtatatgtcttggaattattggtgaattaatattaatacatgatataaataaacaagaatagtttctccaaaaattccatagaagatcatatagcaaaagtcacttacacttagggccaaatggaaattatgatagcctcgcttctcaatttcttagtctaactttccctcttaaaagtacaatggattttttataattttaaaactttctgtttacttacatcacaaatatcgatgtctagcctacatgcacacagattctaactaacctcagttcatgtatcctacctcaagcaggaaaacaggcttcttattgaagctgaagtttttcctgttctgataatactaataagtgaaaattgtgaaaatcggtaaaggagaaatttactttgaagaatcaattcaatgattgtattaattttaaacagttatatactctgttatgaataaataaggctaggagcataaaccacaatccagttatagaatatttgttaaaaagttatattgtgaacataatacacacaagacaaaatatctttctcctataattttgagaattcattaaaaattgctttcccaaataaaagacaaatataaaccaagacaaaatatggattcaaagaccttcagagtaaccatcatgtgtcaataagggggcattacatgcttcattagaaagctgaagagtagaaaaattattaataaagacaatttctactatttttattttataatattgagggactattttctcagaaagtcatactacagttttccatatattaattagtaaactctgactgtatctttagattatatttcatttttacacatccaccctgagttttcagcatggctatcttttgcttatcattcaaatattgatatatcatattttgagatatctttgctgaccacccaattacaaaacattctcaagtctttcatatcaccatgttactctcattacaggctctgtaaaattaatttatttgtttacttttcttcttctctctttccaacataaacagaacagtttcgatcatataaaaagcccccaataagtatttgtcacataaatgttgaatgaataaagagagattatctgagcactgatcttatagttagattgttattttaaacggtcattacaataatctgagcattatgtaaattttcacttgcagaacagtttttctccctgaaaatctaaggtcaagagctttgttatatagtataggaagactgtaaactatagttttacctcccagaatctcagttacgtgtctaacctacacgagttacagtgcatcagatttgtctctccatttcaccattcagatctacaagaaattgaaacctgatttttctgaactcaaacttctatttcaagtccgttttatagggatgctagacaaccttgggtggttctgtgcttgtaaataattaacaactgactaagaaaaaaaaaaggccaccataatcaatttcaatctaccagtgagatgtcactgaacatggatttcagaagaaatgtacttaatctgctcttatgagccagtgcagtgtactccagcatactactggctctagatttctttcttaacatcttataaagtggagctaattattggatggaattatgaaagactgtaccatttataagcaggatattagctgtagatagtgttattttttaagttggagaaatttttctctattcctagtttttctgagagtggtttttatgaatggtgttgaattttgtcagctgctatttctgcatcaattattatgatcatgtgatctttttttctttagtttgttagtgaagtagaatacattggttgcctttcaaatgttgaaccagcattgcatccctggaataaaaccacctttgtgtgtgtctttgtgtgtaattcttttcatatattgttaaattttatttgctaaaattttgctaaggattttacatctgtattcataagaaatattgctctatggttttgtttttataaattgtgtttgtttcattttgttattaggataatactctcgtaaaatgaattataaaatcttccttcctgttgtttttctataagaaatgcagaactggtgttaattactctttaaagtttaccccattctaatacatagtattctagtaaatacagtaccccatgtattagtccatttttgtactgctgggaagaaatacccaagacagagtaagttgtaaagaaaaataggtttttatttatttatttatttatttatttagagacagagtctcgctctgtcacccaggctggagtgcagtggctcaatcttggctcactgccacctccacctctggggttcaagctattctcctgcctcggcctcctgaacagctaggattgcagatgctcaccaccatgcctggctaatttttttcttttttttgtatttttagtagagacagagtttcaccatgttggctagactggtgtcaaatcccacccacctcagcctcccaaagtgctaggattacaggcatgagccaccacacctggccagaagaatagatttaatggacttacaattctacgtggctgggaaggcctcacaatcatggctgaaagcaaaggagaagcaaaggcatgtcttacatggcagcaggcaagagagaagtgccgagtgaggaacagggaaagccccttttgaaaccatcagatttcatgagaactaattcactatcattagaacagaatgggggaaactgcccccatgattcaattatctccacctggttcctcccacaacacatggggattatgggaactacaattcaagatgagatttgggttgggacacagccaaactcacacttggcccctcccaaatctcatgttctcaccattcaaaacaaaatcatgcccttccaagagtcccccacagtgttaactcattccagcattaactcaaaagttcaagtccaaagtctcatctgaggcaaggcatgtcccttctgcctacaagcctgtaaaagcaaaagcaagttagttacttcctagatacaatagcggtacaggcaatgggtaactacacacattccaaataggagaaattggccaaagcaaagggcctacagtccccatgcaagtctgaaacccaatggggcagtcattaaacctcaaagttaccaaatgatctcctttgactccatatcttacatccagggcatgctgatgcaagaggtagctcccacagccttgggcagctcggcccctgtggctttgctgggtacagccctccttctggctcctttcacaggctggcattgagtgtctgtggcttttccaggcacacgatgcaaggtgttggtggatctaccattctgaggtctggaggatggtggcccccttctcacagattcaccaggcagtaccccagtggggactctgtgtggggggtctgaccccacatttcccttccacactaccttagcagaggtacttcattcattagggctctgcccctgcagcacatcctctgcctggacatccaggcatttccatacatcctctgaaagctaggcggaagttcccaaacctcaattcttgtcttctgcacacctgcaggcccaacaccatgtggaagctgccaaggcttggagctgccattctctgatgcaatagtctgagctgtatgttgatcccttttagccatagctggagcagttgggacacggcaccaagtccctagactgcacacagtgggggggccctgggcccatgggaccattttttcctcctaggcctccaggcctgtgatgggaggggtgatgagacatgtcctggagacactttcccccattgtcttggtgattaacatttggcttcttgttagttatgcaaatttctgcagccaacttgaatttctctccggaaaatgtgttttgcttttctactgcattgtcagcctgcaaatttttcaaacttttatgctctgcttcctctttaacacttactacttagacatttcttccactagataccctaaatcatctctttcaagttcaaagctctgcagatctccaggggaggggcaaaatgccaccagcctctttgcatagcaagaatgacctttactccagttccccacaagttacttatctccagctgagaccacctcagcctggcctttattgtccatatcactatcagcattttggtcaaagccattcaacaagtctccaggaagttccaaactttcccacatctttctgtcttctgagccctccaatctctttcaaactttcccacattttcctaccttcttctgagccctcccaactgttccagcctctgcctgttacccagtcccaaagttgcttccacttttttgggtgtctttacagcagcgccccactacccagtactgatttattgtattagtccattctcactcaactataagaacaaacctgagactgggtaatttataaaggaaggatgttaattgacttatagttcctcagggcgggggaggcctcagtaaacttacaatcatggcagaaggggaaacaaacacatccttcttcacatggtgacagcaaggagaagtgccaagtgagggtgggggaaagttccttataaaaccatcagatcatgtgagaactcactatcagaagaataggatgggagaaactgcccctcatgattcaattatctccacctggttcctcccatgacatggggattatgggaactacaattcaagatgagatttgggtggggacacagcgaacacatattgctccagtaaaactatctcagatttctttggaaacagaaataatttattattaattcaaaattaaatactacatatatatgtacatatatgtgtgtatatatgtatatatatagagagagaaagacagagagagagatacaaggaaatgagagtcatattaacatcattaggaatttaatattactagaagacagttcagaataaccttaaaatcccaaaagaagacattttgaagaaaaacttgatactcagttctatccaagctatggcaccaacatgaggttaagattctttttgtacgagagatggtcaaaacattaccattcataaccccatattaaaatattcaatatgcaaagtgaaaaaggaatgtaagactggggacaacattaaacaaaggaaatgacaaacaattatgatccaaagaaataaatacataagtcaaaaaatattttcaaagtatccattggtctttatggtctgcaaggatagtttccttacatacatgtttagtaattcaattttatttaagatcaaatcacaattttttgtgatttgagataaacaaataacaagtagagggctaaaaatactatatccaaatatttcagtgagaaactggatgcttttttcctaagatcaaaagcaagataacaatatcccataacattgtactgaaagttgtagccaagaaaatgaaataaaagacattgagactggaaaaagagaagttatttgtatttgcatatgccattatcttatagatagaaaatcctaaggaattaattcaaaagtattaaaactaataaattcaggctgggcgcggtggctcatgcctgtaatcccagcactttgggaagccgaggcgggtggatcacgaggtcagcagatggagaccatcctggctaacatggtgaaaccccatctctattacaaatacaaaaacaaaattagctgggcatggtggtgggtgcctgtagtcccagctactggggaggctgaggtgggagaatggtgtgaacctgggaggtggagcttgcagtgagctgagatcatgccactgcactccagcctgggcgacagaacgagactacatctaacaacaacaacagaaaaaaacctaataaattcagcaaggttgcagagtacaatatcaatacacaaagatcaattatatttccatatatttgcactgaacaatctgaaaataaaattaagaaaacgtcttttaaaaatcaccaaaagattaaaatatttagaaaaacatttagtaaaagaagtgtaaaattatattctgaaaaccataaaacattgctgaaataaagaagaactaaataaatagaatgacacccaatgctcatgtatcagaagacttaatattattaaattaacaacactctccaattgatctacagatttagtgtaatctttgttaaatgcccaccttacttctttgcagacattgaccatatgatcctaaagtttgtatgaaattcatgggactcaaaaatgtccaagataaccttataaaaaaagagttggaaaactcacccttcccaatttcaaaatttactataatcaagacagcatggtactgggataaagatagacatagagacatattcactgaaatagaattgagaatttacaaataagccctcatatttatagtcaattgatttttgacaacagtgccaagacagttcagtggagaaagtgtagtcgttttaacaaatggtcctgggacaattgtgtttttatatgcaaaagaatgaacttggactcctaccccacctcacatataaacaaattaattcaaattaaacaaaatattgaatataaaagctaaaattataaaatcttgagaagaaaatgtagatgcaaatcttcatgtcctcggattagccagtggctttttagatatgacaccaaacgcctaagaaacagaagataaaatgtgtaagttggacttcattagaattaatatttcaaagcacaccaacaagaaagtgaaataaacaacccaaagaattagttgcaaagtatataataaatctgtaataatgaagaaaatatttgcacagcatatatctgataagaagcttgtctagtatatatgaagaacttgaagtgaataatcaaaagacaaataactcaattttaaaatgcgcaaataatctgaatagatatttctctaaggaagatataaaattaccagcaagcacataaaaagatttttgacattagtcatcagggaaatgcaaatcaaaactactgtgcaagcccacttcccaaccagtgggatgactgcaactcaaaaaaaaaaaaaaaaaaaaaacagacaaaaacaaaatttggtgaggatgtggagaaattggagtcttctcataggctgcctgtgagaatgtaaaatgtgcaccgactttggaaaatggcttagtgtttctcaaaatattaaagatggaattaccatataacccagaagtttcactcctctgtatgtatcatatatcctcataaaatcttattggtgaatgtcaatgccacattgtttgtaatagtcagaatgtccatcaactgctgaatgaatagataaaatgtagtataatcacacaatggaatattattttacattaaaaagaaagaaattactggtacctgctacaaaatgtgctcaagtctcagaaattagagtagggaaaggaagacggacgaagaatagagaaagcttgttttgttttgtttccaagtgcaaaaatctgttttaaaaatatatggaaggaaagacatgctttaaaatgttaacttttttggttttaaaaacatttttccttttatataaacttttttctctttccaaatctgctttatttataacttttatagtcagaaaaaaaggagaattttcattcaacctgatatatagccagagagaattacacataagaataggaatgtaaataagaatgatagaactgttttctgactttaaacccccacattgtttatctttaaatcacattcatatattatcttaatttttattattttctcatgctccaagtatagagacaaagtttatggagtatcgttacatgtggagatattgtgtcaagtctaccttacctaaataatgttataaaagatttcaaaaaatgtttccagacattgtcaataggataacagaacacacacttaaaaagttgtcaacagtgtcagaattataaactgcaaaattgaattcaaggacatttaaaaaattcatgcaatttcaatccttaataatattagggagcacacaaggaaattaggcagtagttcaagtctcattttgttataataacttaggaatgaagccagccccaaatggcctgagtgactgtgtcgtgcgctctatgttctggaagggaactttccctttggcacttgtcatttgaaactcaatccaatctcataagatatggcatgtttgccttattcttccataagaaatgttgtaattcttccttatgtgaatgccaaaatcttgagaggggcataaagtaatgctctgagtcactgaatcctaaaaatactgatgccacagtcaagacagagagaacatctaaagcacagtactaatattaataggagagaggaaaatgaagagtaataatgattattgaggaataactaacatggaatccttggatcccttgggttactatatgagtgtatattttatgtctgtataaattgagtaggatacaatttatgtctgtgtcatacaactgtaagtctgtgtatttttccttttttttttcttttgtctgtatttttgagggtgagagctttcagtactttcatcagatccaaaagggatacatgaaccaaaaaagatgataattatttcaccatggaaaagaagtctatcttatgaacaggctgggttattagttcaggtacatattatgtgagtttttcaggataccactgcacttccttcttgtttgcttgaacttaatgcatgaattacttgacatgcatcctgagttggaggttaactgtccttttccatttcctcatctagtgtgacttaagttcagatcaatcaaatagagtcccaggcctagatgatgcctcttctgtactttgacatatctggagaagggtctgtgaatccacacctaaagtgcatacatctagagatctcagtctgatcctgacccaaggtgggagtgagccgcttgtctccatcctttccctccactgaccccactcctccacatattttctggtagccccagagtccctgctatagccacctccacaggtgatggtgataaggtagggagaccggtgaaagtccctaacataagtccctagcatatggcctgactcatgtagaatgcattcaagaaatattgtctgagtgctttcttgcttgggacttttttcatccctgctaccttctctcccgtttactttgcttgttattgggttgagctgaggaagccatgggggttcagccactgtagtcaagatggtggtcatcagctagggtagtcctcaaacttttaatgcacatgtgactatcctaggtatctttttaaaagacagattctcattcaggaagtttggggttggggctcagattttacatgtgtaaaagttcccagatgatacaattgccgcctgtctgtgaaccactttttgataaccaaggagttagaacactgtatatcaaagatatgtagaccaaagaagctgaatgtagatgggggtaggggagttgtgagtgtgtactcacgagcacatgtatactcttggtcagttgtgggtttactttgctccatcctctgaatcccatcttaaaagcaaggattttccaagtcatccaaattaagttaggcttgaattgtgccctgggctctacctttaaaattagagtatatcacctaatagccatttttaaaaggaaataaaaacaacaaataagggaattaaaaagttgtgtgaaaaccaaaaatatagttgtaattatataaaaagagagaatagcagattgtaatgctcaataaagcatcaataggttactgtaatagcaacagaacagaaataaatgattaagagatatttaaaaatagattaataagaaaggaaactgaggttgaaatgaattagacgaaatggaaaggcatcagtgaaagaagcatttctaggtctgacctatggaagatggaataataaggaacagagaccctactcatgaaaattgattgttctggtgaagtgataattttcaaaacaatacatttaaaatttgaacagaatatactttctctgcataatgtaccatttttctgcagttcattaatggtttctcttctgttcagaattaggtatttgtcattaattaccataacatgtccaaaagtcatcaggtgaacttccctgaagtatattcttatattttgtatgactcaaatattaaagtgtacaaatagaaaaaataagtattgcataagtttccttagcttatgagaaacctgaccatgaatagtatgatccatggatattggatgtatacattgaggtggtgaaggatgtgaaaagaggagagttttcccagagcttcaatagagacagaaaggtcttggcacaagccacgtggtctctccttcagagaattagggaagtttagtagtaatatttctcatagagctggtaaattgagtaatatctcattattctgagattgtagaggatgagattcacaaagacaggaacaaaggtcctggggtataaatgggaaaagaagggaaaaattaatcttagctggataggaaggttagtattgagggagttatccaagaatcaaggttgtgacaaactgcctgaaagtaaaaatagatggagttgtaactgagatgaggtcttagcctccagtttatgttgagttccacatgtttgaatacatctgacatctttttgggaacaagctcatcacaagggcccaggtatacaaaattggccaaataccaatacctcaggcatttaaggctagattcaatagccctaaatagccataatagcactagcagaagcattaggtagtgtctggatattggaagaactgatttaactagtaagtgcaagataatgtgatacaaggcccattgccttgctaccaatagcaatgtagttagaataggctaaacagatgtaacaaacccccaaatatctagtggccaaaacaatatacaggctcatttgttgctcatataacctctccaagacagctgttcctacctccttgttggatcttctctttgtgacaattcagggacacatgctccttccattgcctggatatgcctttaactagggaaggaaaagacaatgtggaaaacaacttccacttttaaaatgctttggtccaaaagaggtgtgtgtcgcttctgctatcattgccattgatgatagctagtcacattgctaactagttatatagaaggctgaagacatgtagtctctagctgggtaaccactttgcagctacatttgtgtactattgaagactagggagaatgagtcttgatggggagcatgtcatctctgcttaatactcatgcaacagaaggtagcccaagagcgaaaggggcattctcttcttttctacacacagaacaggataacttctgtttaatgaggacctctgagaatagagtaccccatgagcatctcaggggtgccaagccattaatattggtgggactacctgcttggaggtggaccctgtaatattggtagatgcacctgtgaaagcacatatcatagcagcatgtatcagcaagagagaattggacataggaggagaaacagcttgtgtgcaaggttaaaagatttgttcatgagcacatgtgagagagaagccccaggaacaaggaaatgagaaaacaattactgcctcctacatgttcccagaggagggggctgggagagcaattaagcataaagagcattaattgcatagaagatgctgagggatcatagatttgaaagcaatttcaaaatatgagtattttaagacttttagcaagaacagacaccataggctgtatatagtttcctggagttatgattaaaggatgaaaacaacttttgtttagatatgtaggtaggtaagtaggtagatatagatagatatgagaatagtaagtttgtttaaacaaattattcattacatcatagtgacccttagtgctttttgatgatactgactgatatggtttggctgtgtccctacccaaatctcatctaatagctcccataattcccacgtgttgtgggagcaacctggtgggagatgattgaatcatgggggcaggtctttcctgtgctgttcttgtgataatgaatgagtctcatgagatctgatggttttaaaaatgggagtttacctgcacaagctttctctgcctgctgccatccatgtaagaggtgacttgctcctccttgccttctgccatgattgtgaggcctccccagccatatggaactgtaagtccaacaaacccccttcttttgtaaattgcccagtctcaggtatgtctttatcaccagcgtgaaaacagacgagtacactggcttattgaggaacagaatataatcagcctccttcattcctcactcactaaaccaatgtgctgatcatttctagaggcaaggacactccaagaatcaagaaagagccgatgatgaggctttctattattctcctggactggacgttgtctcagcttctgctgggccatagaaccctgcctctaccttgacttacccacatgttgttttggtgccaagtattgagtgctgcattttggggtgtacaagacagattggcatattgctaaaaatgtgcgaggacagaaatgacagaaactagtctgtaagattctcataggttccacttgtcttgcactcgtcatgtacaaaaatatgccaagcattgtagttcattaattcagtccttaccaaagctggtaaagcagttattaatttatccactgtaaagttgaggacatccagccttttggaaattaaataactcctccaatatcacacaagtaataaggaggttgtgcagaaattgaaaacttgtgaatttccaaagctcatgcccagctggaggttagagacatagggttcctaccaaaaatgtgttcctagcactcagcatagtgttcagcacttaagaggaaacctacagcagattgctaaactgggtatttacttacactatccaaaagtaggaaggaaacatacccatttgtttgtgaattattgtatcaaatcctattaatttcatcctaaatattaaataaaattcctaaataggaaatagcaatgttcatataaagaagcagcaaattaatttattggaatcgacacattcctcaaatggagatttggttgatattagagacttaatgtacctcccttagtgcttaatgtataacagagattccacttatcttacctatataacctaagaaatttgaatattttataaagttactttttagaaaacctgatttatttgttttccttgtcatctcagatggataccttcctctcaaaatctatttggaatttatattttcaagtattcaattaactaacatattaagcaggcattctcctgtgtaagttcctagcaacttttaccacttgtactaaaataaaacagatagttaagccaaatgagttaacttttctgaaagtgtatctttatacaacattaactatagacatggaaaatacatttattcacgttagaaataaatgcttctgtgagatctttcattttgataaagtcaaaacaccatcttattaataactactatattaattttgcagcaaattacaataagaccacactgtatagttgtgccattcagatgacatttatgaaatgctctaatttaacatggtgacatatattacctgcatcttttacacattatagcttatatcctctgagcgaaatagacctaaaccatccaaaaaaaaagagagagagagagagaataatgcaatgggaaattatacccctttgagaactagaaggactataattacattgcttcctcttaaaaccattcaaatatgtaaccattgctgggaacagcagtatgtggggaacctctttacactctttctgtcttgaacactcaaaagattgagaaaaaaatattcctttcctactatagttttatttgagcatgcttcagaattttacctttttgcacactccttagagattatcgtggggaagtttagaaagcagtttcttggaaatgccttttggaggggaagaggagctataaaaatataccagcctgacaaatgacaggcattgtagactggaaaagaaaagacatcttggttttacaccaatgtagaagcttttctttgcaaatgagtatttttgacagctgagcaagatgataaacagaagtatcacaaaacacttaaatggaaacaagtattatgatgtactttattcacctggcattctccaattcatgacatttatatgtggcagaacccactgcagattcatttatttatttttgaagtggaatgagttccttacgaaggtagcctgttacattaatgtggacttttcttctctagatgcagaagcttaaggaaaaaagttattgtatctgtactataaataagtggtaagtctcagaatccacatcttagggctgagaaggctcctagcaagtacaatatactgtataaatatagacaaataaatatagatatagattttttgtgtaagcaccggcagtgttgcaaatgattagatatttcataaatgccttttctaaaaaggtattgctgaaaccagtctatttctagaacttatattcagatgtttagaggtataaatgcttcaatattggctaagcttagaaaggctatgtttctctgaggctcagtgatagacataccaacaatttgatgagatgcatgactaagaagaaaaagagagtaagactgagtccctgtgaattgattgacttggtgcagtggcagagtaggtagcaagtattaaagcaatagttcttaaatgttagtgttcataagaatcatcaacagaactttttaaaaatgaagattcctaggttttaactttagcgacttttaattctttaggtctggtatatttggttgtgggaaatcaaaagactcaacttcggaatacactgaacagttgctgactatagatttgtatattcaaaattttttggtatttaaaaatggtatgtatggtttattgagtcaaatattttaaaaactatgaatgtgtgctggtttgtttttttttttttttctggattggaggacaatttggggtaagcattctctatttaacaagtcataattaactccctgccaaaactaagtagaaattgtgatttctataactcctatatttgataatatctcctaaaaatatttcagtgatatagcatttaattgcaaataattcatctagtcaccaaacaaatgtagggacgttcctatataccaggcactgtgcatatcaaggtgtatattacagtgaataacagaaacactcacgaagtgttcaattgaatttaaccttgaaatgtattatttattattattatgtttaaataaactatgtgaggtttttttttcattgccaatgagaaacccaccctaacttcagaatttttatctttaagtatatcctattttaaccacccttacccatccactctcaatgatttctcctcagtgtggggccttgccgtggaagtgtgccctggtcagtgagttttgagagtccgtggaagctagattgccctcggctcttcagttcccactgcagaactcttgcagtcactggctattggatcagcagaacctcttctattttcagtcgcccattttcaaattggctcactgaactttaggttctccagttttcaggtctttcaaaagtccgacacccctttactatcatctgctttctcctacacaggggctaatgccatgcaggttttgtgactgctggtggtgtgttcctacctgctttttttgggaggcttctgggcacagctggtcacctagtttcattataatcatttttaatggctttgctgttgttgtgttgctgtttagttctgtcagcttttatcctgggatttagagagacccaagagttctgtggccacataaccattgatcctgattcccctggagtctcttttgacttttactgcctaatttaagctgaacatatgaaatacatgaaaaaactgaaagctcaagctcgtttgttgtttgtcttcctaggttatggtttccatttctccctctttctcaacctattttgccaatcaatgtctatccttccttcactttttgcctactcactacaatattcaattacacaaacataatttttcctctgcccaccccagcaccagcatttttctgggagtttaagtctcttatgaatctgggaagaaaggaactaaaaatgagcagggatgaatagcaaaatgagtgagtcaacgagtagcaggcaggacattagagtgaagctgttttcttacccagaagactgatgatgggaaaggaaaaaagaacaattcaaaattagtagaagaaaagaaataattaataaaacatgagtggatattaatcaaatagaaattggacaaaaaatagtgaaaatgaacaaacgcaatagtttgtcctttgaaaaggttaataaagttgatgagcagaaaacacaaagtaccaacatcaaaaacacaaattaccaacatcagaaatttaaaaaagagacatcaatgtcgttgcacattttataaacattaaaaaattacagttttatgaacagctctgctaataaatctgatgtcctgaatgaaatgaacaaatgaacacaaaaccaacaacaaaaaatagaaatagcctcacatatattaaagacatttaattcatatctaaaaacctttcaacaaggaaaatctcagtcccaaatggcttcactaatgaatttgccactaacataaaggaataaataatattagtcctacacaaactctttcagaaaaccaaggaagggcatatatttctcagctcattttgtgagggctacctaactttaatcccataacctaacaaagcactaaaagaaaagcccattagaatattccatatgaacatagatgtaaaataccttaacagcatattagcaaatggaatcctgcaatatataatagggtaatgcatcatagctgattggatttctcccaggaatgcaaagttagtttaacatctgaaaatcagttaatgtagtaagccacataaatagaatacaaaagaattcccaggtaatcatctcaatagatcaaaaaactttgaaaaagaattcaaaacactttcatgataaataccctctgcctactaggaatacaagagaacttcctcaaactgaaaagggcatctgcaaaaaccctatagctaatattatgttaacaataaatgttaaattttttaccactacatcaggaacaaagcaaggaggtttgctcttataacttctactaaaaattgtaacagaagtctaaagtaggacaaaatgaaaaaacaaaaagccatgaatatcaagaaagaagtaagactattattatttgcagaaaatatgccactgtatagacagtgggagtataaaaattgcttggcaagcatcaagtcccccacatacaatcccctcctcacactactctccttcgtaaagccatgaaaaaccgctttatattctaagtaaggacgggatgtttgatgtgcaaatgcagctgtaagataaatccctgagcaacatttttggccaccctgcccttcctatagaaagtctggggctgtcactgaggtagggttagtaatggtatgtgagactggagagatatgtggaaaccacctcatggtatttggtcttcactagttaggcaatagggagctattgaatatttctgagcacaggagtgacacagaggtgtaccaagtaggtaagaggcagtggaaacaatctacctcagtggggaagagtattgtatcacaaaatttgtttagaattgctagtacttggtgataattaaaagcaaaacaattttaactgaatcttattattttaattttacttacagaaagtgcatcctcttttgtgtacccaggtgtttcattctcaccaccttaccgtaggattattatcatcagaattaaagtagatgaggcaaggcacagtggctcatgcctgtaatcctagcactttgggaggctgaggcgagaggactgcttaaggccaagagtttgagtttatggtaagctatgttcgtgccactgcactccagcctaggcagcagagtgagaccctgtctcttaaaaaaaaaaaaaaattggaatgaatgaaaattaattgatagcagtttattaaatggattagggagaggaacagactggtagatatcattcagtatacaatagctggttagtgatggcaattctgaaagaagaagtggtagaaactgggaggtgttgctagtgtagtatgacctttcaaaactcacagagtgcatagcttgtggatgtatagaacaatgtgaaagaataaattctccagaaaggaagaagaggagttagagattttataaaagagaagtctatgatgttctctaggaaagaaaagaattttctgaagaatatatgcattgattaaatgatttccttttgccctcatttatatttattttctgttcaaatgaaacacttaaactaacactcaatttccgggacagatttcctgttcttacattcttcaatttgctttttaaatttttactttgtttagcaatatcaacattgcctcattggcttttagtgagtttcttgagaagatgtaatctatagaacattagttcttctctcccaccagacagatgagtgcatagaaagacatatagttatactgctgctgttttaaaagtgttgcttcaaattacctaaaatatagtgactattagataatcactgataaaaactgtgttcatctaatttattcatcttgaaatcatgcttcatatttcctttaagcacaaaatagttatgttcacacatgcacaataaatcatatatggattacttgatgccttgaattcaccctcatagaattttatctcctaatgtaaagaaaactgactggggtaattattgcaggatcttactcttttctgttgtcagtaaccttcccaccaaactcattgtgacaattgtcacccggttgactgtgcatatccaccattgctccagagcctaggccagcagacttttgctgcatggtccaaaatggtgaggtcctgggtgtgatcacaaggcaatatgcagcaaacattagtgaccatcagtgctaacaaagaaacttacaaagtaacaacttgaccacttggccaattcttccactgtgttttcagctcttcacaggtgtaggccatgccttaaacttaattgagtctagcactcttcctgttactattattatatttgtagcttatgataagcagagtgaatttaacataggggttatgatcatgcatttgagagttgggccacttagtaactgtattagtccgttttcacactgctgataaagacatacctgagactgggtaatttatacaggaaaaatttatacaggacttacagttccacatggctggggaggcctcacgatcatggcagaaggcaaagaggagtaagtcacatcttgtatgggtggcagcaagcaaagagagagcttgtgcaggggaactcttgtttttaaaaccatcagatctcgtgagatttattcactatcatgagaacagcacaagaaagacctgctcccatgattcaattatttcccactgggtctccccccacaacacataggaattcaagatgagatttgggtgaggacacagccaaaccctattggtaactgcaccacctttaataagtaatttgatctttctaaggtttaaattcttcttctgtcaaatgaagattcatgtattttcacaaataataaaatgacgaaaattcctgccactatggagcttacattgtaaagtgatttggggagttggaagagaaagaacaatcaataaatataaaaataagtaagtttatttactaagttaaatgctataggagaaaactagacaaagtaaaatgccttgagagtaccatattaaggaaaggaattgcagttttggaaatgtagccaagagacttttaattgaaaagatggcatttcacttgagacctgaaggagatgaaggagttagtcatgtggaaatctggaagaagagacctaggcagaggcagcagcctatgcaaacaccataaggtggaagcacccctgatgtattcagaaaaggggctgtatagctgaagtgagcagaagaaagagtaggaatgtcccaagcctacgggatccttgtgcaagctgcaaataattggtcctttcactttgcaagtactgccccacatccatcaaatactttagaaggtttgaaaaaagtttgactatcaatcacttgatgaattttcctgcccactatttgctctataccagtgtgaaatgtacagagtaatacttccacttcatctttaccgagcacttactatgttccagagatgatgctaaacatgtttacattaataatctcagttaatcctgacaacagacctatgaggtagatattattatgctcattttattgataaatacgtgaagacttcagtagatttaagttgttcagagtatagttaattctgtggctagtaattgtggcacataatcctaatgttccaggaatttatatcatttagttgaggagacactcctcaactcctgtctcaggtgacaggagtaagtgaaattctaaggcacaatatagcatggtgcataagcaggcaggactgcagccacagaaccctcaattttaattcaggctaagtcacttactttcccttttatgttagagacgtctgttagtttttctacaggaagtataatacctcacagggtaatttattcacaaatacgaaaacatgtataaaacatcatagcagtctgcctgcaatatcgtaagtgttcaaaagggttgtggatattattattgttgttgtaagctaaggaacgctagaaaaacatcaaagattcaattactcaaaataacttttgctgagcatctactacatgtaaaatatgtatactgtgggatcaatggatgatgtaaaggtgcaaaaggttctggcccttggggagtgtatggtacactgggaagttatattttcagacaagacataataattctaatacaagctagaccttaaggaattgaatgacagaggtaacaagaaaatgctgtaaaatggctgaggagagaaaaatcctctaatttgggaggagctcagtattgacaaaggctagaaatgggtagagaacactttcccaaaagagatgtcgtggtgcctggtgagacaggctgtgaacttgacttctcccatccgttccattattaatgtgtgtctctgtgctctagcattcatttcatcttgtggacatgctattgtttccatttaaaaactctcttgatcacaatttcttctgtggcgatggtctcatgtcctgctctcctttttggcaaaactccttaaaagacttgtctaggctcatgcctccaaatcctattctgctattatttcctggaaatatatctgtcaggccttcactctcatcattactttgcaacttttcttgttaaggtctccaaggacctctgtctttttaaacaaagctaaattctgtcttcattgtatttgacatacaagcaggatttgacacagttgatcactctcttttcatttagaggactccacattctccgggttttcctcccatatccctgactatttcttctgtatcctttttctgtgccctcctcttacctttgaacacttattgttggagtgctctggaactctctttagaggactttcctgtatctacgctcacgcccttggtgatattttacttcaaataccaattatacacagacaatactcaaatgaatttcacaatcatatttccaattaaacacttaacatgttttatatatatatataaaatattatttgaatttaattatctttatcttcacatcaatacataataatctatcagcaaatcatgttggttctattttcaaaaatatccatagtctttcattcttcctagattcaataattcctttgcttgtctatttagttttctatatgtcattaatcttcctcatgctgacgtctttgctacatgaatatatacatatatatggtacacatacatatatattttatgcacacacacatacatatttatgctcaaggacctcctgccctgctatcagcctagagcttttcatatacctctacatcctcatttcctgaatcccatgccttccattcttgttgctgttgtctgtttactttctttttgctggaactatattactcaatagcttcctgatataggaagttaaagttttgaatccttgcaaatccagaaaatgtttgtattctttctttacaggcaaccgataatataacttagcatagaattctggattagaaataactttactcataatttggaaggtaccattcttagctttttagtttactataatgttgcagaatactgcagtgatattctgtattttctatgtgacttattttattggtctctggaaatttttgtttcctttttatttttggaatttgaatgcttcatgagattgcaccttgatctgggtttttccaccagcatgtggtgagccttttttttaactttttaatattttatttttaatcaatcaacacataatatttatacctattatgggatacagagagatatttcaatacatatgtaaaatgtgtgagtatcaaatcagtgtaattagcaaatccattaccaccaacctgtatcatttctttgtgttgggaacattcaaaatcctttcttctagctatttgaaaacatataataaattgttgttaactatagtcaccatacagtactataaaacacaggaatttattcttcttacctatctgtgattttgtatctgttaaccagcctctccctatccccttctccctgctatccttccaagactccagtaaccactattcgaccttctactttcatgagatcaactggtttagcttccacatatgagtcagaacaggtaatatttatctttctgtgccaggcttatttcacttaacataatgtcttccgggctaaacataatgccctctaggctaatccatgttgcttcaaaagacagagttttattccttttcatggctgaatagtatttcattatatatttatatatgtgatatatgatatatatatatatatcaaattttctttatctattcctttgctaatgagcacttaggttgattctatatcttagctattgtaaatagtactgcaataaacatgggagtgcagatatctcttcaacgtactgatttcaaaacgtctggatatatgtacccagtagtgggattgctgaatcatatggtagttctctttttagtttttttaagtgaccttcatacttttttccataatggtatgctaatttacattcctaccaacagtgtataagaattcccttttctctgcatccttgtaagcatttgttattttttgtcatttttataacatattttaactgggaaaagataatattgtggcttttgtttgcatttgtctgatgattagcaatgttgagcattttttcgtgtacttgttggctatttgtatgtcttcttttgagaaatgtctgtccagaccatttgcacctgttttaattggattatttggggccattgagttgattttcttatatattctaggtattaaacatttcttggatgaataccttgcaagtatttttccattctgtaggtcgtctctccactttgttggtagtttcttttgctgcgaaagggcattttagtttgatgtaattccatttgcccagaccaatgtcctgaagcacgtctcctaggtttacttctagtattttcatagttttgggtcttacgttgaagagtttagtccattttgagtggatttttgtatatggtgagagacgggggtctattttcattcatttgcacatggatagccagtttccccagcaccatttattgaagaggatgtccttttcccactctttgtttttggtgactttgttgaaaacccgttggcagtaaataggtggatttatttctgggttctctattctgttccattggtttctgtgtctgttttacgacagtatcatgctgtatagctttgtagtaaattttgcagttaagtagtatgatatcctcagtcttgctctttttgaacaggtgactttgtctcaagattgatttgtctagctcagtggggtggctcacgcctgtaatcccagcactttgggaggctgagttggacagatcacttgaagtcaggagttcgagaccagcctgaccaacatggcgaaagactgtctctactaaaaattcaaaaattagcagagcatggtggcgggcacctgtaatctcagctactcaggaggctgaggcaggagaactacttgaacccaggaggtggaggttgcagtgagccaagactgtgccattgcactccagcctgggtgacagagagagaccccacctcaaaaaaaaaaaaattgctttgtctattctgggtctttatggttccatgggaatttaaagaattttttcttctatttctgtgaagaatatcattagtattttgataggaatcatattgaatctgtagattgcttttgataatacagtcatttttataatattagttcctctaatccatgatcatgggatgcctttccattttcttatgtgtcctctttaatttctattataagttttatagttttccttgtacagaacttttaccctttggttacatttattcctcagtatttttgtttttttagctatcgtaagtgagatttcatttttacctagtttgtgcttgttgtataggaatgctactaatttttatatattgatttgatatcctgcaactttattcgtttagtttatcacttctaagagttttttggtggagtgcttagtttttattacatataagatcctgtcatctgtaaaccagaactagttgacttcctcctctccaatttgtattcctgttatttctgtctcttgcctaattgctctggctaggaatttctagttctaggttgaataaagagtagtgaaagtgggcatcaccatcatgttccagttcctagaagaaaagttttcaccttttctccgtttaataagatgttggttgtaggtttgtcatatatggcctttattattgaggtacatttcttccatactaatttgctgacagtttttagcataaagggatgttgaatttcatcaaatgctgtttctgtcttttgagatggtcatatggtttgtccttcattctgttgatatacttttatttatcccatttattcaatttgctcatattgaatcattcctacatccttggtataaatcacacttgatcctggtatgtaatatttttgatgtgctgttggattcggtctgccagtattttattgatgatctttgcaactatggtcatcaggaatattggcctgtagtttttgctgttgcatatttggttttgctatcagggtaatgctggccttataaaattagtttagaagaatttcctctccttcaattttttggaatagtttaagaaaaaatggtattagttcttctattaaagtttggtagatttcagcagtgaagccattgatcctggacttttctttgttgggagactcttaattactgaatcaatctcattacttgtgagtgttctgttcagtgttctattcctccttggttcaattttggccagttgtatgtatccacaaatttatccatttcttctaggtttttcaatttgttggcatatagttattcataatagtctccaatgatcaactgtatttttgtggtttcagttgtagtgtctcctttttcatttctgattttatttgagtcttttttctttttttctcagtctagctaatggtttgtcaatattatctttcaaaatatcaactttttgttttgttgagcttttgtattgtttttggtctcaattttatatccttcttctctgatcttttttatttctatattgtgccttgcagaggacctttctagttaaatacatttgggaacttttgagcttcctggatctgggtatctatgtctgtcccaagacttaggaagttttaagttagtatttcattaataagtttttattaccctttttgtcatcttgtctttctaagctcccacagtatgaatagctgtttgcttaatggtgtcccacaagtcctgtaggctttctttattctttcttattctgttttctttttctttctgtctgcttgagttatttcaatagacctgtctttgagttcataaatcatttttttctgcttgatctagcctgttgtcaaaactcttgattgtatttttatttcattaactaaattgctcagctccaatatttctgtttggttcatttttatgataccaatttcttgttgaatttctgatttagatcatgaattcttttcctgatttttttcagttgcatatctgtattttcttctatcttgctgagtttccttaacatcattattttgaactccttttctggcattttgaaaatctcttttactttggggtctgttactagaggattattgtgttcctttggtagtgtcatgttttcttgctttttcatgtttcttgtgttcctacattgatacctgcacatctggtaaagtaattgcttcttttaatgttatggactagcgcttatagggaaagatttactcctgtagataagttctagagtgttaagtagagggtgataacttgggtcctgagtgggcacagtagtgtagtctctgtgaagtttcttcaactgtaatccatgtcagtaatgtttgtgaatgcttcactgacctaacctgtgggagtttgtggcagcagtgacatgactttactggaatcaggcttattgagtgagttatcaggatggaggcatgtttgtgcatgtgatgggtcacctagcttaggaactggcttgctttgggtgaagccgtgggctgtttctcaggccgggggcatgagtgttcagtggatcagctggttctggaactggttcaccaggagtgaggctgttgggtcgtttctcagtttaggggcataggcacatgttggtttgccagccattaagccttttaaaactatggtttcatgtctggaaaatgtgtattttatactaattctttattaacttattcctttaattttttttccttttggtgtatttctgaaaatttgttttcatctcattattattgttagcctttctgatgtattttcttatctttctcttctaatcttttagttgagatttttttccagcctttttttttttttttggatatagaatcttagtatattgtctaggctggactcaaactcctgggctctaacaatacttctacctaagcctcctgagtagctgggactacaagcacatgccactatgcctggctgtatatttttaatatttaagaattctttctttcaccaattgtttattcttttaggcttttttttgtttctatattttttaatgaatgcaacttttatcttctggggataacagagatattttattaaattgttattagttgatgatttcttccatctctaattccctgcattgtttgtttcctcatctggattatcatttttcatcctcctcctttatttttgtttctgtcattcacattgtatattttgcacatttgatgaattttgccatctgctttattctgtagagaaatggtaaaacatttccaaaatggcctttactcatgtttatgagcagcaatacagctttactttgcagaggttaaaagctcaaatattagttctagagttcttatctttgtagtatttttctgccagtttcctctttatggaaaataactctggctcccggctttctttaaactgtgtagaaggggagttgtggtggtaaaggggagaggcagtgtatacagactttcacttaatcctttcatgtctaccttgtgcctcttccaataacaagttgttgatgttccaatataatggagctggttaatttcaattattcttgacaataagactgatgtcactgtggagtaggattagtttggctggctgagtggggttgaaaaggggacctgaaaatctaaatactttctatgtggaatacctctaattcatgattctcaaccttggcactatggctattctgggctgggtaatttgttgtgagggatggatatgtgcattgcaggatgtttagcagaatccctggctacatatcagtatactacatgccagtagaactcctcccctcactgggacaaccagaaagttcctctggggacaaaatcttccttagctgagaaccattgtttaactttagacctgtgtgtgtcctcttacttctctcaatgtttcattatcttcaagtcttaaggctctcaaagattctataggaaaaatcagttttcatgttttaggaatccaattcagctagcactcaagctgtaacttctctgattattcaagaatgttgtcaatatttatttctatttcttaatttcattttctgtcttcaaaatttttgtaaaatgtatttcttccctattgatttctctgctggcctcattaaaattatgggttatattttttaaaattcctatttttttaattgaagtatcaagaaaaagaggaaaaggcacatgcttgatctgaactttatcaaaaattggtaattgttttcatctcttactattaactcttttttaaatcgatcctcttgctttaggaatccaaatcagcctgcactcgtactgcagtttctctgattagtcaagaacgttgccaatatttatttatatttcttcatttcatttttcgtctttgaaatttttgaaaaatatatttctccattattgttttctctgctggtctcattaaaattatgggttttacttgttaaaattgctgttattttaaagtagtgagaaaaagaggaaaatacatgtgcttaatctaaattttaccaaaaattttatattttagtaaatgtattcagatgcatatttttctgacaatgggcagtcttagttaacacctgtatcctttttcttgagcaagaaaataaatttattataatttttacttattctgccctagtattcctcatggataaatcgtgtcttaattttattaatctttgaatgcatcaattctaataagttggatcctttgtcagaaagcagaatgtgtacaatatacttatcccttagttttgtcttcctgggaactggctcttgatcacaataggatatatacctacagatcagcttcattataatttaatttactgtatttggcagcaacatcttctagtggtaacctagaccgagatgaaatattccatttcaattgacagttataaagctacagaccatagatttcagttatttgagtagttactacattaaaacacatctttttttcccttcctttgctcccaaccacatgtgcagcaaccagtatgtttctaaattttgctcctgtttataatgctatttcttaagcttctaaacatcgcagtgtgcatttcacctctgctaatctccatccaaattctgctatgttttggagtttgtaagaaagtgtagtgctgatgaggggattgaagtttcaggattccaattttggctgcttaacaggaacagttgaaggatggcatgaggtttttgatccatggttttccatttccctggtatagtaagcataggtatcactgccaaacttctttggagctctatgttatttgggttgagagcttggagctatgttaaacagctgaataaatgtttcccaatgcagctctgtctatgatgcagctcctgaaaattctctctgaatgttgtcaactagttttctcttaaattgagtttatagttgttttgtcaggtccaaatgtctttttgagactttactttgactgaacattgtgatagaatttatcctcctgcttgaaatgataaaaatatggacaaaatgtattaaataattgtttgctagatgttggacatcaggcaatgaggacaatgtttgctgagaaataggaaataaattatgtgaatcttacaattgacccggattactgcttacagagtatttctagaccacgacttagggagagaaatcccagatggagctcagagagttctccaaattgaagagatatagccaagtgtttcaggaattcaaagtagttagagtttgcagagagcagatagaggaacacagagataatttcacagatctacagagcatcttccttaagaattcactttactacggttcactgcatgtatgaggctgcagaaagcacaactttcaattattaaaagtaacaataattaacactcatgtaatgctgggtatgtgcctatttccactagctgaactggcgagaaaatttatgattcgtgggatatttgataagagtacacaaaagggtctagcctcaacagtggagaatagccctaggctgataactacttcaataccacctaataaatcttaagagcaagactcaaaaggaactgtttccaagtaatttaactgcatccaagaacaaaacacaaatatatttgtaagaacactgaaatatgtagtacctaacaagaaaaaattcacagtctctggcaccaaatcaaagattatcaggcatgtaaagaagcaggaaagtacaacttataatgaggatgtaaatgcatcaatcaaaattgatccagaattgtgagaaatgttagaattatcaggccagtatgttgaaacagatattacaactctacatagtttaaaagctacataaaaatatggaaggtactaaataaccccacagatcaaaattccagagaaaaacctacactgtatggaatgaaaatacactggatataattgattatacattaaacataaaacatttatgttatatataaaaaattagtgaacttgaagtcatagcaatataacctatccaaaatgaaacagagttgaaagagcatttgtaaaaatgaaaacagcatttgtgagctgtgggacaacttttagaggcttggtatatgtgtaattggagtccctaaaggaatggtggggtggaggtgggaatataaaaaatattcaaataatttatggctgaaaaattccaagtacagtacactgaaaaccataaagccacaaacccatgaatctcaagaaaactaaaaaataagtaacatgaaggaaatcacaaaaggcatattataattgaattgctcaaagctagtgataaatttttaatgataaaataaaatactacagcagccagaggaaaaagacgtgttaaatacaaaggcaaaacagtaagaatgacaacagatttcctatccaaaataatgcaaagaagaagacagtggggcaacattcttataactatgaaagaaaataaatagtgcacttatgattctatatctagtaaagatatctaagatgaaggtgaaataaaaactatttgcaatacatataatgaaagagttcatcacacagaaacctatactataagacacattaaaaagaagtccttcagtaggaaataaaatggtatcatatggaaatatggatctgcacaaagaaacaaagagcacccaaaatggcaactgcattggtaaatacggagggtatttttctaatgatttaattttctttaaatatagttgacagtttaaaaaataataataatatagtaaaagttttataacatgtgtaagtaaaatgtttggcagtaataacacaataattaagagggggaaaaggaagtacccttgacccttgaacgacatgggagttaggggcactgattccctgcacagtcaaaaattcaagtttaattttgactctccaaaagcttaactactaatggcctaccattgaccaaaaaccttactgataacatgaacagtcaattaacatttattttgtatatattatttactgtattcttaccataaagtaatctagagaaaagagaatctttaggacaatcataagaaagagaaaatgtatttactatttgttaagtgaaagtggatcataaagatctttgtcctctttatcttcactttgagtaagatgaggaggaggaataagaggaagaggagagattggtcttgtggcctcatggctggcagaggtggaagaagattcttttataagtagactcatgcagtgataacccatgttgttcaagggacaattgtataccgttgtaagatccttatactctatttgaagtagtctgtcacttaaagctaggctgtgataaagatgtaggataaaaaccactaaaatcataaaacaaagagttataactaataaaccaacatggagataatttgaatcataaagaaatataaaataacacaaaacaggcaaaaaaaaaaaaaaggaaaaaagaaatcccaagcagatgggacaaataggaaatatcaagataatagatttaaacataatcatatcaataataatgctaaatttacatattctaaatactccacttaaaatatacagattggaagattggttaaaaaaggaaaaagtacaacttaactatatgctgcttacagaaaagatatttaagtataagacacaactaggttaaaagtaaatgttggaaaagataaatcttgtgaacactaatcataagaaatctagggtgactttattaatatgagaaaacatgaatttttagaaattttgtccaagataaaatattgcccaggatgaagaaagtaatttcattttgcaaaaggagtcattttgtcaataggacataacaattcttaatatttctgtaccaacagcagagcttcaaaatgcacagagcaaaaactaacgtaactgaaggagaaagtaaaatccacatttgtcggcaaaaatttcaatacccttctctcaataattaatagaacaaactgacaggaaataagtaaatctatagattagaacaacactgtcaaccaacttgacccaatggccagttatggaacattcaacccaacagagcagcaaactacacctacttttcaggcctacacaaaacatctaccaaaataaatcaaattctgaaccataacacaagcctcaatagatttaaaagaattcaaatcatataaagtacattatggggctgcagttaaattaaattagaaatcaataacaaaataacctggaattactctaaatatttggaaactaactaacaaaattctaaataatccaagattagaagaggaaacccaaagaggaattaagaagtattttgaactgaatgaaaatgaaaacacagcataacaaaattgtgagatacccaatatggcaggacttagtagtatattaatagcactaaatgcctatgctaggaaaggatgaagatttcaaagaaatatcttctactttacaaaactagcaaaagaagggaagacccaagccaggctaatgaaagctatttctgagtttctaactgcatctcatggggatgatcatttcttttctctgctcttgtggctgaaagcatgttaaggccaaaattgtgattcaggcaagacccaaatttataagaccaagattgcattttaagccataaagagcaggagaatctccatggcttgaactgtgaatagatatttgtttgttatcagagatagtaattgtactgctttatctgtatttccttccatgttagtaaaagaaagctcagaagtagttgatcacatgatcatagagaataaactacatttctcagtctccttggcagctaggtgtagaaatgtggtttaagttctggtcaatgatattttatctattaacgtttgctgtttaagttagtggctaaaaacaataaaaattgcgtatttatttaggattctatggtttggctcagtgctggtgtgcactggcttgtccaacctcttctgggctctctcatttgtctgtgattagctagctggtcaagcagcagttagataggaagacctcactctcatatgtggtggttggcaagctggctgttcactgggacagtaggagcaattattagctggggcacctcagttctctgccatccaacctctaatattccagcaggatagcatgagcttgctcacaaggtgatctcagagttccaagcccagcaagaaagaatgaactctaaatttgcaggcattttaaattgtctgtttgaatcatatttgcaagcattatatgtgctagtatttggccgaagaaaaccaataggtcaatctagagttattgtggaaggatcgtaccaaagagtgtcttagtgtatttttaaaggaaaggggaatgcctttctctctttctacttcttggtggacagcaattggttttagagtatgagtagatttgtattttctcacattaaaaaggtagaatctacaactgtggaatctatagaagtaaactgggtattttcagttgaatcttgggaaactgactaaagttaacatttttaaaaataataatgctttattttatttttaaactacattttaagatatagttaatatacagaaattataatctatatgtgttacagagagattaatgaaatgggagtaaacttgttattttattaatttgtggcagagttcatatagaaagaattgtttttattgacaaaaatatctcgataagacttaggttttggcaagaatcaaggcaatattatacacttttgagatgtctgtgaaaaagtgaccatgtaaagtcaggtgtatagaaaaaagtgaatatgctttatagcagagcaaggaggaagaagagagaagccacagaagatggtagataattggagtgcaagatggtaggtaattggagtgccaatgaaaatctctagctatagggaaactaaagggatattatgaattgcaaagtaatgatttaattcctcttttaccccgaatctttaataaggtttaacgactacaatttgtttgtttgttttgaacaagacttcttgaaattgaggcattagctgagtttcacctctgggtgacatagggcagtgctggcagaagccagaaagacttcaaaatggaagaagcagaagtgtagggtcagggcgactacgaaatgatcaatacgcatagaattcttataaacttaaggaggacttctgtcattcagggatggaattagggtcataggctgccttatctagatttcaaaaggcaaggacgctccagatgatacatgcattacatgtaaataagaatacaacaaggccaggtgcagtggctcaggtctgtaatcccagcaatttgggaggccgaggcggacagatcacctgaggtcaggagttcaggaccagcctgaccaacatggtgaaactgtgtctctactaaaaagataaaaaattagccgtgcctggtggcccagctactggggaggctgaaacaagagagtcacttgaacctgggaggcggaggttgcagtgagccgagatcgcaccattgtactccaaatttgcaggcatttttaaatgtctgtttcaatcatttttcaagagttaaactccatctcaaaaaaaaaaaaaagaaaaaataacaaaacatataaaagataaaggttttgcacttttatttctctttaccttttgcacacttccttgctctttgaaaaagtattgtttacatgtaatgtttaagattattctttgacggaaacatcacatatgtccaatgccttaaggtgtttactatctctttggagaacaggactgatcctgtaaagtaccagcaaagactcaggcctgagttatgggttgatgtacttgaagtgttacaagtatgtacccacacgcctattggattttcatggtatgcctatatgttacacatatccaccaataaatgccatctatttttgtaggctgaatcaaatctctgtcttgagtaatgattttgtatcctttggactagatctgaataagactgagaaacagccaggcacaagaaggcaattcattgttctcactcatctttctaaacctatatgcatctttgatattgaggttcattattagctacaactacatttggtttgcatataaccatttatttttcagtcttagatattttcatatcaattgtcttaattatccttaaataaagcttccagtgagtctctatttcttggatgaggacaattgaggcagtgatagttctttaaaaattatttaatttctaagtccttcactatatcttgtaactgaatcccaacctagatatttttaaatatccttgaaattaaatataaatcaaataatatctttccacatgtaggttacttccctctatggtaactctgcctccaaatgtgaagagctggattcaatccaagtgaaagaaaatcagtggggaaaatgtcagggactataaaagagatttgaagtctgtacccacattgctgtgttagagtcctgagttattaaatttctcatatttatttgacattttatatacatatgtccacttatgaagagtttagttcttatctttctttaatcaacacagtattaactatgcatgtagtagatgaacactgtattttatgtatttgcattcttttcaaaccagatgcttaaagaataaaatgacacagtgttttagctgttattttgctttaaaatgctttaaaacaagaaacatttttggaatttcttatcacaatataaatcagctaagtatatttaatgtggtgaaatgaatcataaataggctgaaatagtcctaaaaggggagttgggtaagaaaaaaatgtattaggatcaatatcaataggcataaataattctattaacaaataacattaaacattgttacactgtttatgggatgatatcattatatcattatagaaagattctcccttaatttaaatacctagcatgtacaaaacaagtttaaatcaatgagacagtaaacaagaggaataaaatagagaggtgggctgggtgcagtgattcacgcctgtaatcccagcactttgggaggccgaggcgggcggatcacgaggtcaagagatcaagaccaatatggtgaaacctcgcctctgctaaaattacaaaaattagctgagcgtggtggcgggcgcctgtagtcccagctactcggaaggctgaggcaggagaatggtgtgaacccagaaggcggagcttgcagtgagccgagattgagccactgcactccagcctgggtgacagagcgagactccatctcaaaaaaaaaaaaaaaaaaaaaaaaaaggggaagtggtgtcctaaagactaaattaactgctgactattttctattttcagtctctacatatttatatttttatttctttatatagcattgaatggttaattccccatttcccttttattcttatacgactaacttctatgggttttattttcattcagttctgtatattccccctgctgaagcctcccatgttgtgtgtcaagaggaaaaatatcttattaccttcttgtctgttgaacatttagttttcttctccctccctccctgtcttgtacctaatgagcaaattatctaaaaatagatacgttcatcattctacaaaatgttgtatcttctctagattggaggacagtgtaattgtaagagacacgtgtctggcaggcagtgcaatcagtgccagaatggattctacaatctacaagagttggatcctgatggctgcagtccctgtaactgcaatacctctgggacagtggatggagatattacctgtcaccaaaattcaggccagtgcaagtgcaaagcaaacgttattggtacgtgtaacgcaaaagtttacagtcacatctctattaccatctggaataaaattctctatttgatttcttaactgaagagtaaagcaaatttctttgctcaagacaggctggaaaaaaaaacaatttggatgaaattaactgtttaaaatgattaaattaataattctatcaaactgcagcttgaagcttagtttaatcaaccctttagaagtttctttattctgtagatgcattaattcccatggtcccatactaataagtcatagaaaaatataatttgcttactgcatagatgtttcttttagaaaattagcactttttcaaaatgttttacacttaatgagttctaagcaaatcatttccatgctagttttcttaatagaccaaaataagtggattttttcaaaatattctgtgctacagggtcctttgtgataaatctttccatttttttctgttatatttctttgaactgttcctatgaaatgcaaaataagtcaacataattctacagatcatgtatattgctagggttacttacaaagggctacataattttaattttgtaattcagcaccaagttgattataataaacagctgccttcggtgttatttatcatttttttatacaagacgtgcttttttgtttgttactcccacaggtatttttcggaaattagatttgattatagcaatttattacatccaacatttttgaggggaaccaccgccacataaggacaaaatttatcaagtgcctaaaatgcactatgttcataatgcactttgaaattttgatatatgagaatattatgagaggaaagtttcctgatgaagtgagccctgtattgtaactgaatatgtcttggttcctataggaagtttaaaaaagacctttgcctttctattgtcattcaagacaccaagtcatccatggtttttctaacactgacctgaaccttacaatagtaaaaatatgcctggcagtgattacacacactcctctctctctctctctctcacacacacacacgaatgcttacatgtacacatgcatatgtacatatcattctgaatactattttcatttctgtgatatacctctaaatctaattctttatcttttatttatgtaagtgtacatcatgctacacaattcagctagacaagcgtttcaatttaataaagagaatgtaggtgtgtttagtggcattacacgagatttctctggtttaaagaaacattacatgaaaatctgtaccataatttacctatatgcatctcaagcatacagaaactaattttttagaaagaaagaataacgtgtaaagagaagtacatatttgtatgtgctatccatgatgctgaaggaattctaagaccctgaattcaatttgtatggcatcctttgttctttaatgtgagatatattttaaactcaagatgtgaaaacaaaagttaaagcaagacctttaaagacagtgaaataattacttctttgtatcaatggaatctttcttgtgatggttagattccagagcttgaggaagggaaaaatcaaaattaatttagaatgtataatgccatccctactatttgcctgttttgttgattgatccagatggttttctgcaggaaacataaatatatattttgtgaagactaaattacttcagtattataaataattattatttctagtgttatttctgcaaatgtagtactttttataaaaacaaaaacttgatatgcatatatatttactttcctaatgggatcagcaagtaactttattcaatttcaccttgttaatatgaaaaaaaaagaagcccagaaaatacaagtgtatgttgtatacgcttcagaaagcaaactgttagagttaacaaaactgttaaatcttactaatgattctatcaccagtaaaatacattagcaccaataattttattaaagtaggtcattcatctagaataaaaagggagaagaatgtgaattaaatgccaagtgtgctaactcgcctgtacttgttaacaccgaatgtgatgccctgtaggccttcctgactatcgttaggaatagattacctgtcaggaatatgtatggcatattcaaataagcactgtgcatatttttaaaactgatatgatatgaatccatgtagaccaattttaatagttcaaaatgagtcataattcttgttaacaatacagttatttttaaaatttgcagcaatagtggtccttttttattttccttattgaaattaaatgatatgccttaggtgagtcattcatcactgttaaagaacttgccttcattggagttcttgaatttttatccatatatatacatatatattatgtatttccttccagtttaggaaatgcttttctacatatgagttcctgagtatgtttttgactcttattttaagattaatttttaaattgcaattatagcttgaaataaatgtttcagttgattcaacccatgcagtgagttatttaaattcatggatatttggaaactatctaaaggaagtattttgcatctaaacatttactattctaatttttttatttctttgccttgtaatacccttttatcttttagaataaccttacttgtcagagatttaagtttaggtgataaaacatttttcttcattcgtaaaatgtatatgtgtactcctttaaatagaagtaatataaaaaacagaatttacttagtgtttaaagaggtatgttctgagtcacacaagatgacaagcaatgtgattgctttatgagccaaggagagcatgatttatattaattgaaaatgataaaatagaggagcatacaaaaggattaaaccaaaaattgccctggataagttttatttatattaattacttaaatgtgtggattcagaaataagtgtatatgctgttttcacaaaaatagttatcagctgacatttttttcttttttcccagcttcacgaaggtataattaaataaaaattgtatatatttatggcagacaacatgatgttttgatatatgtacacattataaaatgattaattccagctaattaatgtatccatcacctcatgtacttatcatgtttttggggtgagaacatttaagatctaatctcttagcaattttcaagtatacaatacattattattaagtatagtcaccatgctgtacaatagagctccagaacttattcattctgtctagctgaaactttgtactcagcttaaccttttattaaacatctttagagatttcttatctttagaaaaacaactaatttgttatatgtaattctactataattttaaatgagcacatttgttaaaatagtttttaagatttgttaaagagaaaaagagctccagcatatgtaacagaaacaacatttgcattaagcatttttctttgcattaagtaataattaaaaatttatgaagttcatcgcaaacagttgtatattaaagctaaattaaatattgtcattgaattttgagagtaagattggccccctatggcattgcttgtgagaaaacactcaatattttgtgttcgtatcatctgcagtagcattgtttgtgtctcgtctatcttgaatgaaatcattttcccatcctcaccttttaaatatattttatctttagggcttaggtgtgatcattgcaattttggatttaaatttctccgaagctttaatgatgttggatgtgagccctgccagtgtaacctccatggctcagtgaacaaattctgcaatcctcactctgggcagtgtgagtgcaaaaaagaagccaaaggacttcagtgtgacacctgcagagaaaacttttatgggttagatgtcaccaattgtaaggcctgtgactgtgacacagctggatccctccctgggactgtctgtaatgctaagacagggcagtgcatctgcaagcccaatgttgaagggagacagtgcaataaatgtttggagggaaacttctacctacggcaaaataattctttcctctgtctgccttgcaactgtgataagactgggacaataaatggctctctgctgtgtaacaaatcaacaggacaatgtccttgcaaattaggggtaacaggtcttcgctgtaatcagtgtgagcctcacaggtacaatttgaccattgacaattttcaacactgccagatgtgtgagtgtgattccttggggacattacctgggaccatttgtgacccaatcagtggccagtgcctgtgtgtgcctaatcgtcaaggaagaaggtgtaatcagtgtcaaccaggtaagaaagaaatgtattacattttcagtgcacaatgacattccttttgttaacttaggtaacttctccctgtttctggtttgtggcttctacaaattttatttccaaaatcattactgtatttatatcattatccaacacatatataactatttaacttattcaaaattatctgcatatttatgttactattttgagaggatactttagataaaactcagccgatcggatttatttcataattgagactcaatttctacacttgaagtaaatctcctttttaacagttttttaaaaatcagatcaacaagagtcaattttattttccagagaaaggaaaatttgagttgaatatccatacaatgccaaatattcaaatgatgaactaaatctctgaataaagctggctaaatgtttttgctgaagaggctatatgttctagttttatatagaaatacctagaattgtttccacatgccatcaaattaataaaataggccactgtttaatctcattatatacaaacttatctttccatctctttcccaattgggagagggatagaccccatctatggctctccttacatttaagattttaactaaaatactataccttctttacaataaattcattatgatatgatgataaatataagtacttatccgttgtttaacagctgtgctaattgttgtcctgtcagccaatattagctctgagttatatgggtctataaaaatgagcatgataccaactcaaaagtgtgatttgcttgccagagaaggagtagaacaaaagttctgttaacatagcaaagaatccagcctaggataattgggccatgcttttcctttggcattggtcagtgtgtaagatcaaagagacaagaaggaattgatgaagagttcattctttttgtgatgtaagtattaaaaaacaacttgaactggtttaaacataaatggagactatattataactagatactccataaaaacctaaggagaaggaccactgcagtcaggactcaggaattagaatgcttccactgatacatattcatttgtctctctctctctctctctctctctctctctctctctctctctctctcagaaggggactttacctctctctttctctacatgggtatatggccaccctatgtcccctgaaattgtttataattctaccaccagccacaacagagcgatttattagctacctcttagttataatttctagaggaaaattcgaattgactcagttttgtttggttggttacctctgagccaattcattgtggccaggggtgtcacgtacttataaaatgagtatagcttttagggaccatttcatcaggtagaagcaaggtggtaagtatcccagaagacaggaagattatggagacctgggcagacagcctaaatgacagatacagcacattcactctttttaccttcaggttaatcctttcaaatttgcaatcaattaactttttgatatcctaagatgagatgtttttttctcttttagtgtttatcaatatctctaattttggcaacaaagtcctttgtctcctacacagtcaaataaccatgatttatacatccttctttctaagtaaaccaaaacaagctaatagatcaaatgttatatccttttgagtaattatcaattgttaaaatttactgttccagtctaactttaattgtatgtataatacaagtcacatgttttaaacaatttttctgattttggaaaaactctgaaatcatagttacaaacatttgttccctttggtccttccaatgaaagacccaatccatcatctcaatactttgtacacctaccagatatctaaatgatgaactaaaattgttagaaaacctttgtttttctggttgttttgcatatcattgcagaaaaagccatggataatttaatctacaccatgcataagactgtctcatttgttcccttcctaggatgaagaaatactgacttcattgctctttcctttatctttgtggctctcattgtggtgatctctttgttcccaactctaagcccttttctcccacccaaatctatggctctttcctgtctaccctatatagtattggcagaataattcccctaaagcacttaattcgttatgtcattctcctgtagggttaccaaaaatgggttttattttgcttatcatttgagtccaatctgggcaaacctttatgagtttttatcttccagtcgcagtctagacacctagctttgcttcctgatattccctttctcccatcttcttcagtcactgcagccacttcactggagctacacatgtcacatgcagagccgatttcaatctacctgatgctttggttcattctcctttcccgacatggaatgcagtataatcctccttttcaatgttagttggcatcctctgactagttttactactcaacatactgcctaaaattctccatcactcagtgaacaacaaagttgacatgagcatcagtgttttaagaggtggtttaactcaaacctatagaaaacttgaaaataaggtgtttttgaaaatgtgctcaagcttctattgtcttcatgttcaatttattatatgaccttgaagagaggtttatgttcaagaaataataatacagatctcattgtaattaccccataattatgcttcttttttctgaagaccatatggacctataaatgaagtcaatgagttaagagtagggagcattaaacatggtgaaaatatttttatttactgaaaaaattcaacagcgtattgtaaaatatttagtagaaaatgtaccagactgagaaaacatatttggagctccatttcttcagcttactgactctctaaaggcattcccctgtccttctctacagggaacttccatattttcttccaactgtccatttctagccaggggtaagcagatttatctttaagctgttacctgagtggagcctgtatcagttctactcatatcctattgatcagagctgctttgtatatccatacctcactgcaaaagaggctggcaaatagatgctctatctgaatatcaaggtatatatttaaaacttggggcctcttttattataaggagtaagaaagagattgatccttgaagacagccttggctatactaggaatgtcctacacctaaaaaaattagctggcagaacattagtcaacttccgaatagatgcttttaatgaccatgagttttgtacttttattgatagatcccattattatcattttttaaaaaaatcagccaaagttaatgaaggcctcttgagtcctgaggaaatatatgcacaaaatcccttcttgggatcttcgactgtttcttacatgctttgccttatagactcactgctattctagtcactcttccttccaaggacatgctacagtttatagtggccctgctgagttattgacccaggatattaacctggttatgaaaagctagaatgatcaagctacagatttggattattatattttgttgaacagtgcagttattttcatatagataaacatttctcttactgagaaatcattttcttctgggtactgttgagttcttaatttaatcagagaacattttatgtgtagtagcaaacggtactttcagtgagcttaaattttgatggggaaactgacagaataatttgcaaataaatatatgatatgaatttaaatagtgatgatttttggatctgtggctctactcaattatgtttctttcttgctaagagtttaagatattatcgaggttaccaaatagactatttatttagcacttttatatcagtgtttagtttccagaaaggtgaactgggtagccatgtttatattgtacaagtgaagtcacattgatattttattgcaatggaaacagtaagtggtttaaaaggaggaatggtgaagtgaaagaaattatcaacctgtttctttttatattattatctaaaactagtcatttttctgtttttctcttttgcattttttctcatttaagatcataagtgcctgttttaaaaagcagcccaatgagatgaccttgttaaaactcctgattatttctcagtatcgtcaattaaatgaaccccttattgtgtgcccacaatgtacaaggaattatatatacatatatatatattttttttttctttttttttcttttgagatggagtctagctctgtcgcccaggctagagggctagagttcagtggcgcagtctcggctcactgccagctctgcctcccaggttcatgtcattctcctgcctcagcctcccgagcagctgggactacaggcctggctaattttttgtattttttttttttttaaagcagagatggggtttcaccgtgttagccaggatggtctcgatctcctgacttcgtgatctgcctgcctaggcctcccaaagtgaggaattatattattattgtagttatgcaagttgaataaggtaatccttgccctcaagatattgaaactttaacaagggaaataagacatttgcacaagtaaataaaatacgataatactttaaatgtgatcattgtttttcagtattagtgttgatgcccattctacatcttcctctaaagaaaagaagacaatttgcaataaacctttggaaaggagttttgttgcgtctgtacttaggcaaatcgtgactaagaagttattctcctaatggccgcacatggtggctcatgcctgtaaccccagcactgagaggctgaggcgggtggatcacctgaggtcaagagtttgagaccagcctgagcaacatggtgaaactccatctctactaaagatacaaaattagctgggcatggtggcacatgcctgtaatcccagctacttgggagactgaggcaggagaatcgcttgaacctgggaggcacagattgcagtgagcagagatggcgccattgcactcctgcctgggcaacaagagccaaactccgtctcaaaaaaaaaaaaacaaaaagacaaatatataccagataaagtcctccaaaaaaagagccaggaaaagagaaaggagaccaggagggggttgcatgaagaaaatttagtattattatccagtattgccattgtttaacataatttgagttttaatcaaaatttacatttgcataatttaaaaaaccaaataaaatgtaaagagccctgccttatcattttcctaggaatttccgtgcttagagaaaacaccttcaactcctttagatgtttattctgggctttcatgtctgtaattctgggttttacatatatttcaccttgatttttaaaatgtagatattatctattgtcttcctcctatagaagatgaatgtttagctcctttcacctcctgcttagcaatccctttatttggttaaatcagtattcagagatttctttattatgactatataaatttactgtacagctatgccatataatatgatttgactatattttctttgctcaaaaaatttgtcttccttagtttttcaggactctctttggcatttctaggaaacaaaactctccaagggaactctgttcaagaaatctatcaggttttgttttttcccactagatatatgagtgggaagttcaggctggttgatctttagttctgttgcacagctatatccaagggctaacatttgctgctatactagggatttccttcccctgtctcctatgttggatcctccatttcctgaatcctacacgttctctcttcttggtttatttgtgtatttggtagagcacatgttctagtagcttctgaaaaagaatacaaggagggaagtaatttgaggagaaaattttgaatatctgaagtgtctttattgtctacaagtgtctaaacataaagaacgatttgaaattttactattatatgaaaacttttcattaaaaaaatttaaatggttgtaccattagctgttagcaatgttaatcagattctttcttcttttctacttttttttttttttttaacgacctggaagtttttaccatctctatatccctgggcactcagtggacccttttgcctatcagtgatggttcttatgttctgagaaaatctgcaaacacattcatagcaacatctagactcatgttcgaccaaacagttggacaccaagcctagccaagttgatgcataaaatcaacaatcacaagcaacctttcacataatgcctgtttacatacttgttgagtccagactttctttagtttaacttctaaaggaaaagcttactgcatcttcctgaagtgtaagagggacaacttcctggttggggaaggtatttagcacaccttatatctgacttcggaaatctctggggctttcaattccaaacctttctgtctagagttacacaacttgaataaattagcttattgtcgggctctccactgcaagagcttagctttttcttataggtatctataattgattgtcatttttctccttctctcttttttttttttttttttttgtttatttcatctctggggatttcaggagggaaacattattcaatctaccatgttttactgacaatgttcccctagtgtttttgaggttttaatcttttcagaccaaatctttgcagacatccttgagccctctcttttccccacaacctttgtctcatctaataaaaccaattctgctgattttaccttcaagtatatccagaatttgaccacttcttgccacccttacttacaccagccaggtccaagccaccttcctctgttcctggactattcaagtagcctcctactcccctttatctttcttccatcacttctcaacagacagccaaagtgatgctgttcaaacttgagtaacatcccatcactccaccttccatttgcttttcaccatagctaataagaaacaaagttgatattctttaataatcctcatggtctataatgtccatgaactctctgacctcatttccacaagtcttcagatcatttcttcctctccagccaacaagcctcattgctgtccttcacaactgttcaatgctctatctcaggcaggtataaaagtacctccatagcagtgctccctatatattttctgaattaatggataattatatttcaaaaatacctcagtggcattctcctgtttttaggtgtgagcctagcaaaggtctgtggtgtttttttcacaacacttacgaaaagcgttgtgttcaaccttgcaaatgaggaaaaataacagtgacctaagtatcatatattttttaacaaaacaagatatagtctgcacatattcatagcccacgaaaagagcaatgtgtgctttggggtggacatttttttattttttattttttattttttttgttttgcttcagaaattccactttaatgtttttttttttcctggttttatggtctcttacagtaaaacttgcattgaaaagagaaacccttatcctgaagtatctttatcataaacagatgtttgcagtagccagccctgcaatgtgcacagtaaaatgtgctgctacaatctgaagctttcatttacttatttaaacatgtctgagagacctagatcatataccacaggggcagacagcatgctggtgtgtgagcagtggggcatggagggagaaggatggggtaggaagggatgagtagcaagcttaaggacttctgcctccctttcatctgtgattgcaaatactgctgacccatagtagatgactgcacatagattcttgtcccactttcctaaaaaacattattaaggaaggtgcatgtaatgaaacctcatgtattattaacctaaccttactacgaatgtacaaggaataggtttaattcaagtaaaatttataggcaatttgttaaagcagcagtgcacattagaaggtacattagagacacattggttttaatatgccattcaataacttgaacagaggttaaaaatgctgcttaacctccattaagtattttaaaaatgctttaatttaaaattatttggagtgtgtgtacatatatgaatgtacacatatccacactaataaatataacactaaatatgttttcccagttccctttttcagtgctggatgaccttataatgttcagcagtaggcacttaatcagaggccaggccgaggaaggcagggaaggatgtcaacgcatcccgagccagtgacccacccttgtccttgagaactagaggcagagagtgcatattgaagactctgtagctttggaataaaacaaaggctaatttataatgaaaacagcttcctatgacatgttttgtactaatagggcagtgcctcctgcttccccctagtatttacttttggttttcttttacaattcataaaacaaagtatcttgtttcattaagtagcacatcatatttattaagtaatgagctcataaactagaattgtgtacaagaccctgccaatggaattggaatcagatgctgatgttccattaaaaatcaatgcatcaaagttgatatccaattatgccacatttcctagtgtttggtgagacaactttctaggttaacatgtttttcacagagagacctgaatctaaaagtaagaacctcttccttgataaatcatcaggaaggaatcttgtcacaggaaatacagaccacaatcttaggtacatctggaaaacaaaaaaaagtaaaagacactgataagaaaaatttctctgtcatagaaaacttgctaattgacaattacaaagatgataatagataatgtttactgagagtccgctgtgtgccaggctctgtgataaggttttgcctgcaaactttcatttaatatgcacaatatttctaagatggaggtgctgggattattctcattttaatctaattgggggaatgaaatctaattaagtagaagagccatttataagtccaggtccatctgactccagaatgtatactctgaaagagtggaactttttctttttctttcttttttttttttttttttttaagacggagtcttgctctgtcgcccaggctggagtgcagtggcacgatctcagctcactgcaagctaagagtggaactttttctaaataactaactcaatatttatcttacacattcacacaacaaatatttgagggtgagttagataaatactgtttatttcatccactttcaagcatacctcaactcatgattctggcttactgcttcacattctgggatacctcatttgttgttcaaaacccaagtagtaggcataaaatgaaaattaacagagtcctgggaaaccacagagttcaaataatgatgaggtaaattgaaggggtctagaaatggaattatctccgagaacttagttggagaaattctggagatggttggaatggcacaggagacaggctttagagcatgcatttgataaacactgaatgggaacagagaatataagttttgctgtggattttgaatatgcatacacatacatatattaattataatctccaagatgtaatcagagttgtcattatttgggttatttgttgttattggatttgattcttagagaatatgttaatgagggcctttcatgggtattcacataaatagaaaaattggattatttatgaaacagaaaattccaataatgttttcccttacatgagcatattattatgtcctttgtttaagagctaagatatagttttagggtgacattttctttctgcagctctgttccatctgttgctgtgacgagcactatattttaaatttattgtgtctgatccatatacactcctctctagactccctgataggacaggccactctgaccaaccactctcatgactcacagatttatgtttaccattttccttttcagtgttaaagggatcatctcatattttagaggatagaagatatttatccatctatccacccattcatccattcagctatctatccatttcattcatacatctgtttttcaataaacatctattgagtaaattaccagagactatgttggtgttaaggtatacaatcacaaatatactaagacattgtgatttagtaggggaaactgactcacatgtaaatgtatcacaatgtgatgagagccatattagaaatatacaatatagagaagtagtaaagtgaaggaaatgattaattcttgaaggatgaggggtcttaggaacttagagaaaatgatttctgaactgacttttaaaaggaaataggaatcagcaagctgctcaagaagggagtagcagcccagaaaaaaaaaataacagcagaacatttaaagcatacctaatttaattgaaaaacccttaaaaattgttttaaaaaagagaaattataccttgggatgaataatattaatatttatgtattcacttgatcaagtctagaagtaattttagcgtgattttatataaaactaccaaatggaggaaaattattattgttttaatttgaaaactaccatcatcaactatactgaaatatagtttacaaacaatacaacaatattgaaaatattgattcataaagccattaccaagatagtcttttgttgcatggatataggtgagccacccatccctccccaggctcttgtgtaactattatgtccattttctgccttaaggtgagagtagtttcttctaaatgtcttacaattagtgcttagccccagcattgccctcctttcttgaataaagcctagaggttacacttcttttctttctccctctcaagaccttggcaaagcctagttgttcatggtcctcaggagagacattgctgggaaatgggctcttcttttatgcccaggacaagtactgtgctatgcaaatagccgctgcaggagataataccagctgccttgctaataactttgaactctgtagattcttctcctaggcaaagccacactattttacaatatgggtgactctttgttttagctggatgatacatttttttccacttgagatttgtcatgtctaaaaccaagggtcagctaaataatatgggaaaataataaactagcgagctgatttggaccatgtatatgtgaactctcagcactacgtaatgcaaggtaataatgttgtcctaatgaccatgcttaagaatgtggtacaaaatcattcatggaatgaaatctcaatatgatcagttacaatgctacagatatataaagatttggaacatgaagaagagctaacaaaggggtatcagaaatgcattacattaaagtaaattgaggtcagttataattaagccacattcaggagttgatgtttaagtggaagggaagggaaaagattgttttctatagttggaagtcataaaaggaggtaatggtctagaattaggcacattcaggtaaggcaagaggtaatctttaagcaggaagttacctgagtcatcctaattagaactgcttaaaaataggacagctaaaatactggtgggattaacctttataatcaggctcctgagaggaggaggggaattaaccccaaggcaaattcccatgcagtcttttcctggaagccctaccttcactttcagtctccctaggtgctttagcatctttttagttcttctctgcttgtacttctgatttttctgtgacattctttattccccaaaacttggactacccaacttctgcaccaaaatgctatcccctacttgtacttacaggtttatctaatacatcatttcttctaaaaatcacccttaatttttccaaattctctgtggcttggagctattgcagtaagtctaaattaattctacttgtaagtatctgtgctaatgggtaatttatccaaattggagagctgttagcacattcatgatgccatcatcatggatttaagggcctagataccttcacaggaagaaaaatacaaagaatcacaaccacagtggccttgaatttaaatggaagccttctgaatttgactttgatcatgtgatgaatcaggtacaagaatatatactaattgtcatggccatgctctatttctggatatgtatatataagggaaattgctgtcaggtggtacaaataaacaaatagcgtaacctggctgtaaattatgataaaaatgatagtattagttgatttccgccaactgaatggcacatattttgagctctttcttttcctctcattgagcacaatgttttctattttgctgcccttgaaactttgtaagacagaatgtataggatctaggggaaggaaaaaaacccaattgttggtaactataagaaaatggcttgttttcaacaagagcctggaatgagttttagagtatcctaattactttttgctgttccctatataatagataagagaatagattcactttttgctcatgctctccttctttcaatatcattgctattttatgaactttaaattagtgtcatgacaattgtacaattcatttttatttgctgtaactgtattcattagaatccttctgtgatccttctaccccattgtttcagtaaaattctttgcagcattttgcacgggcttgtgtgtgtacccatgggtctgtgcatgtgtgtatatgtatatgtacacatacatgaacacacacatcacacaacactaagaaccatttctccctcatatgcctgctccacattcaactgcctgataactttctaattctataacagttaacttccatctcctgggtctgaagagattttaagtaatttgaataaacttttgaatcatatttgtatttctttcctttttccataagaaaaaaaatatgagttttagaggtaagctaaagtctctaaattctgcaggctttttttgtgtgtgtactacttgcagggctcacagcctgtttaataattgaactcatttttatttgttcatcgaatgtgtttggaatgcctactatgtgccaagcagtgtactggctgctagggagacaatgatgaatgaagcagatgggttttctgcccttatggaagttagattttggtggaaatgagattgattataattttcatgaacacttaggaaacaaacaggatgctatgcatttgtaacaggtatacctagcctggcctagggaaagttgcctgaggaagtcacgagacctgacttacatgagtgaactgagcaacagagataggtcaaaatcatcccagcagacagaacggcccatgaaaaggcctttaggtctcaagaagaggaacaaatatgactgcaatggactgagcggggggatgagccatgagctaaagctagagacgtagctgggacctgactgtaggattgaaagctgagtgagagatttggatttatttcctaaagggaataggaagtcatcagttagtttcaaatagagaagtgaaatgtccaaactgcactttggaaaaagactgctacgaagaatagattggaacaggacaagagggatgcaattagaagagatggcctccgggactgggtggtctgggtgtaaacctgggttttgctatccattaactctaccattttaggaaagtgtgttaaccttctcaatcttctgttttccaattgacagaatagatgtaataataattcatgcattatttgcatttctatgacaactaaatgagatgctcaagataaagcccctacagtagcatctagtttgaagtattagttataaaaaaagtggttggtgactttatctgggaggtcgtagcggggatgaagagtggaaggtttaaaattgttaggaggcaacatccataggacttggtaattagcaaaatatagggggtcagagaagtggaggatgcaagcttttgttttagtaaaatacagaattagtttaatttgaatttcagataactttttttagtctgagcaaatgctgcatgggctgcacctttgctaaaaaatttcattatttgttagaaattcaaatgtaactggcttcctatattttataagtctgccctaccaaaggtacctcagtgttctaggcaaagcaactgaatgactggtaatatctgttggaatggagctgattagaggaggtcaagttttttgtagaaatattgaaatattgcatggtagattttaaatacattgaattgtaggacctgggaggcacccaagtccaatgtagataatttactcagtttttctttggtcataattgacacactgaaggacagatataaccacatttgtattgggaattagtgccttggtagagtattctgtttttctgtgtaatcaattattatgctttaaataaaagagtggataaaaagtatatataaaacttttaatttctttatttctaggtttttatatttctccaggcaatgccactggctgcctgccatgctcatgccatacaactggtgcagttaatcacatctgtaatagcctgactggtcagtgtgtttgccaagatgcttccattgctgggcaacgttgtgaccaatgcaaagaccattactttggatttgatcctcagactggaaggtacatctttataagctttaataatttaactctttctttagcaacagttaactttttttggcagttgcaaagcaataacttctgtaaaaagtattttttttgcccggcttggtggctcacacctgtaatcccagcactttgagagaccaaggcaggcggatcacgaggtccgaggtcaagaggtcgatatcatcctggccaacacggtgaaaccccgtctttactaaaactacaaaaattagctgggcaaggtggcatgcacctgtagtcccaactactcagaagtctgaggcagaagaatcgcttgaaccgggaggggtaggttgcagtgagccgagatcgcgccactgtactccagcctgggagacagggcaagactctgtctcaaaaaaaaaaaagtgtttttttgttattgatatgttttttgttccgtgacatccacatttacttaatgtatgctaatctttgaatatttcctagagtgggttgctatatattgatagatgtggcccatcctagcatctgggaatgttgaatgagataaaatatattttctctcaaaaagctgagagtctggatgtggagaaagacaggaaaagacatatctgaagaagaaaatacacatactcatactttctctctctctctctctctctctctgtctctctgtgtatatatattatatatatatattatatatataatatatatatatatatgggatatatgtatgtgctttgttcttcattgcccttgaatttattgcatatttattagttcattgcatctatttatattttccttgcgtttctaatttagctttaaagactggcagatgagaaacatagctttgtattctgtgatatgatttttttcagtatgtaaagtatattatgaaagtaaatcatttttcaaagttacactctctttaatattctacttcttattctctgggtatctgtggccatttgccttcactcatttgtgtttattgctgtatttttgaagatgtgctataatgccaattctgtgtctgtgtgtgtgtgtgtgtgtgagagagagagagagagagagagtgagattatgagcttgtctaaagttcagactaaatctatgaattctttgaagctcctatccctgagaagctagtagtgtgtgctgaactcagaaagcatgtaataaaatgagtcaaatctgtctctcaatatgtgtatatttataaatctaattgctaattatttcagggtttgtgattatctgggctcttttaaactcattgcccccctgctgcctgccttttggctgttccactcctcattaacacctccattagagggtggacaggtgacagggtaattactgaaaaagaacttaaactagttcattttgactttcttttaaaatttgatgtgatttttaaaaactacaaaaatcatttaaaattttattaaaataatttttgttttcttgacatacatgcatatattttaatctgtgacgctctacttctatcaccgtagaaatgttaccttgatggtctgagaccattgtgactcttttctacagatgttattataaatcatctaaatgagtatacaaagcgcatggtacagtaaatagtaaataaaaagcactgtcaggattttgatagtaaaataggagccagttactgcacatactagctcctagatgtaatttttttgaaataatattctacagattccccagttggaactcttgggctggtttgtttcactcctggccacctctgtctttttcatagttctgaccacatttaccaggagaaaaatatcttccccaacccactgtcctccttgcaacactcattcccatcagtgccattttgtgacattcaattacccatttttgttctactcatcccctttgtcagtcttcccagggttatcagcaaaacgcctgctcagtgacctggggatgtctgattgtctcagctttttcacttaactttttttctttaagtgagatctgattcccttcattacactgcttcctctaccctacaatgttcttaaattcgtggctgagccttttaccccattctgttcctctcccattatctacccatctcactctcactccccaccttactttagtccaggaacaagaattgcttaataagtactgttccatcacctgtcactctgcagtaggcctgactagcactggagctagattccctgggttagaaggtggatttaaatgtttacataaattgataaggaataggaaggaccaaagaagtgggtataagctacatttttagaagataccgaagttacaataaagaaagaattcagtctaggcactatggctaactcatgtaatcccagcactttgggaggctaaggtgaccagatcccttgagtccaggagtttaagaccagcctgggcaacatggcaaaaccccatctctgtaaaaaataaaaagttagccaggtgtagtggctcttgcctgtagtcccagctacttgggaggctgatgtgggaggactgcttgagactggaaggtcgaggctgcagtgagtcaagattgtgccactgcactccagcctgggcaacagagcgagaccctgtctcagaaaaaaaaaagcaaaaaagagagagagaaagcagacttcagattcgcaaaaagaatgaggggcaggttggagtctagaaaatagagctaaagtatgagaagctgagtagatttctaaaaatatgaatgattcagattaagtgtggggttttttttttggacagagtctcacactctgtcgcctaggctggagtgcagtggcgtgatctcggctcacttcaacctctgcctcccaggttcaaaagattctcctgcctcagcctcctgagtagctgggattacaggtgcatgccaccatgcctggctaatttttttgtatttttagtggagacagggtttcaccatgttggtcaggctggtcttagactcctgaactcgtgatccgcccacctcggcctcccaaagtgctgggattacaggcttgagccgagtgtgtgttttaaacaaaaagatccacaagttttatataaatgagtttggatatctttacatattagttggctcctgttatattgatgggggtggtgagattacctttttaaaattacaaattgtccttggaaatggtcgcacttttcttccatccctgtattagtccgttttcatgctgctgataaagacatacctgagactgggcaatttacaaaagaaagaagtttacgggacttacaattccacatggcttgggagacctcacaattgcagtggaaggtgaaagacacgtctcacatggtggcagagagaagaaagcttgtgcagggaaactcccctttttaaaaccatcagatatcgtgagacttatttactctcatgagaacagcaggggaaagaccctaccccataattcaatcacctctcactgtgttactcccacaacacatgggaattgtgggagttacaattcaagatgagatttgggtggggacacagccaaaccatatcaatcccctttgttcttatctttccagttccaggttttccttttcagagggattctatttttctcccttttctaactcctgccattattttaaactactttgacatgtactgatgcagttctttggcctcttcattcattccccactccagcaacccatttccatggctacaccctggattttgtgatcacttataatttctctatttctcaaatcttcctaatcccatgaatgctattctatggatatatcacatctttccaattccaattcaccctggaagcctcacataacctgctccttaacttctcttaatctttatcccattatccctccttaatcctcttttgatcaaccccatccctaacttcactgtcttctacttctagcctgaggcaaaacctttttaattatgacccttttgagtacctgattgtgggctcccttctgctgtactgtggggtcagctccagagacgatcaccctacacctgccctgatctgtgaggacgtggggaaagatcatgtgcctatgctgatctgaagcactaccatgtatgtacttcttatcaatttactttctttccccctttaaactcctaccagtctcctcagttttaattccatgctcttgcccttgcagataatctggccctctgctcatagacaaaataaagccagatatatgtatctccagattatcttttctccacctccagcttgtctacattgtcacacatttttaattttttatctagtcttagaagaaaatcctgtgtatttttgcctaaaaataacctgttcccagtccttgatatgatcccttcctgttttcctactcttgttcctccattccatgatctttgctccatcaaatcctccctttattttaactcaaacatctctctataggtaatatcataactgcctacaaaaatgctattcattctacaaactccttcctttgattctgccctgctttatgagccctgaaagttattgtctaatctctcactcttcattcacttactaacatttaaaaagagcactatgattcaagaaaacatgatttaaaaaataaaagatcagattttttttcttcttcattttgtttctttctcattcattctttattcaccatgtgtggtacatacatgttagcagaacatacaagttagcagaacttgcaacatgcagacattcaagaactagttatgtgactattaaattctcatccaaatcaaagacaaggtctataaagagatataataaacaaaaatgggttaaggaaaagacagaatgagggaacaggtttcactggtgggaaaaagggaggggtcagtggtgctttccacttgagtccagtgagaaggtcttatttgatcccttgaagggtgacatgtgtctcctgcagttggagagaccagtgcattgatatctatcttagacctggcaaatctaactgagaagagacagtctacccaggtttggataggtaagctagaagacagtgccctgcatatcttagactcccagagttcatcatgacaaggaagactacgtatttctcatgaccggatgaagaccacaaggaagaaagacagggtaaggttgtcttagtctgtgctcaaagtaccacttagaagataaaggggcctgtgtagaataaaggacaagattactgtggactacaggttaataagcaaccagtcgaaaagaaaatgcatctgactgcactaaaacaaaaggtgagagatacctaatggtgagaaagatcaatgaagaagtcaggaatgtaccactgtcagtgataagtcagttttatgtatatgcaggaccagagacaatagactgctttgggtggttctagtccaagtgagtttctacccttcctgcagcctctacgtgagggaggaggctaaccaagctaccttctctgattatagacttgctgcctttatcatgtcctagcttgatgaaaggaagagaagtatgttcttgaaaatgtctgttctttaaataaagattggaatgttgactaatatacaggattagactttctattttctgaattgaatttgtattttgcaatgtaaagtaactgtaggacattctattgcctgagaaagaccagaaaagccaagtgactaactcattttatatccacatggaacatgggggaattagctccatattatatgtttaaagggtcagtgaaagacaaaaataaaactgatttatgattgcttctcatgacttatggtttctcaatgtgctggtcatttcattgttcccatttatttcttaaaattacctcttcctttggtttccaagattctacttctcttatttgttttctaactctttttttggctactcctttttaatatgtcctttcaatttccacaactgtgtccctgatttcaaccactacatacatgttaatggctttcaaacacatgatcacccattcagatgcctgccacgcactctaggcctgtagccagctgtctctctgagttttacgcttgcaagtccctcgtgcatttcatttttaatatagtcagcacagaactaaccattacttcctcatctccacccaaataaaaataagtcttatgccatctcatgctatcatcatcttggtgaaaaagacgtaaaacttcaaataattattcaagtccaaacttcccaagtttgagtggggcttagattcttctcaggtttggcagaattggctctgttgttgagtagaatgagtctacaggctactgctggaaagtgctatggaaagcaagagctactgtatataatgcagcttctctaaaaagaatagaaagaataaagcttcccatggccatatgggacccaaggagatcagcaggatttgtctcttactaaatcagtcgtgtggaatgctggtaacttgacttgaccctcctatcccactgatgaattcagctgtctcttttcacttcaacattgataatcattacacaggaaatcctgtagcacagaagggcatggagaaggatattttaaaatgtgacaatgagaattgcttgagtttggacttttgttcaacattgaaaagagataaaagtgggttctttttaatgtttttccattcctcttttgaatgataccgttcttgaatctttttttgacttctggttgttattgtatatacaccaacattggctatattgaaaatgtgtaacaattgactaagatatatgggattccatcaagtataagaaatttttgttttttaaaggaaaaaattcacatgtaatgtaaatatatacagatatgcagtataggaaaacagctatgtcctaatgttaaaacaatgtttttgaaaacaaagtagattcaaaatcatttgaatctactttgaaatctaggcactgtggtaggttattacaaatagaaatgtttacatttataaaaattacattccaattataacaaatggaaattaaaacattaattttcaaaatatacagtagattataagtaacttattattatgaaaggggaagatacaagtatcatattatttcttcatcaacttggaaaataacctcacttccttatctgcctggttcacatattccttaccttcttcatgctctatttgttggatatagcaaggtttgctatattgttttctcttggtttatttgctacacagttttttgtattcccaagggcaaaataaataaaataaaatagacctcggccctaaactacacaaccaacaacaaaaatccaggcaacacaacaatgactttttgtgaccaagctggaaaatcatttgcctgtttccatctaagtggtttattcttcaaaagttactgaccagaaaaagggggcatgtattttaaaaagctgatcctagtgcaaacattactccatttacctctgacacataaagcaaacatgatttaatcagtatcgaaaacaatgaagcaaaaaaaatctgcccactgaaaaatcaataatgcaaaaaagtatatagtgtttgtctaacccaaaaacaatgagacaaaaatgggccatatttaattcatctcagttggtagtggagacccatatttgacaccctgcacttactggcactgtcctcaagttgacctgtgactatgactactctcccccatagcccccaggactgctccagttcatctggtaccccacagttttcttacataacaaccacacatcacaacccccaaaagtttcttccctaatgatataccctctctatattctatgttaccttgttttaagccttaaggagttagtggtatcactatttgtcccatttactagctgacacacactgaagttgtccatagagggtaggacaccaaggctggttagggagaataaaggctcagacttctggagcataaaatacagggaagttcttctatgcccagattatttttggttttactgcaaatgttctacatttcagcactaggttatagatttggtccagtaatcttttcacaggcctttatccgattgatctcaattggtcttttctctgagaaccaggtcaatgacttcagatgaaagcagataacttccttgtcaactgatttccttttatggtgtgataatggaaaaattagggagtgtgcctcatagattccctctcctcagtgactctttgtcagacagctggctgtcatctggggtgacagggtaaatgggccacaagcctgtcatcatctggcagccaaggcagggctttctcacaaggcagtggcagatttccaagaaagaaagcagaagcatgcaaagacacttgaggcccgaaccgtcaggatgttacttttaccttattctactggccaaagcaaggcacgaggcttaaccatgtttggaagtggtggggaataaacagactctccttttgatgagtagaactaattatacagttagctgcaaaggacctgcacagagggaaaggtgaagagttgtgatttttgcaatctcctatggctgccaaactatatattctctcttagtatagatgatatatgatctgataagaagtatcagtttttatatattagtagcatttattcaacgtgatgtaataggaataacatgcaactggacatcaggatatccaggtttcagttttgtcttttccactagaccagatacagtagcttcctattattggtggaataaattatctcaaactcagtggcttaaaacaacatgaatttttattatcttatagttctggaaatcagaggctctaaatgagtttcactaggctaaaatcaggcctgtgtttcttatggagattctaggaaaaaaaaaaacatttccttgattttcccagcttttagaggcaacctacaatctttttttttttttttttttctgagatggagttttgctcttgttgcccaggctggagtgcaatggtgcaatctcggctcaccacaacctccgcctcctgggttcaaatgattctcctgcctcagcctcccgagtagctgtgattacaagcatgcagcaccacccccagctaattttgtatttttaatagagacagggtttctccatgttggtcaggctggtttcaaactcccaacctcaggtgatctgcccgccttggcctcccaaagtgctgggattacaggcgtgagccaccgcacccatcgtacattctttagctcatggctccttccttcattttcaaagccagcagagcagtgtttccttggacctctgcttatgtccttacatgttttctctctgactcttaccctcctgccttcctttataaggaccgtagattacattgggcattcttggataatccaggataatctccccatctcaaaatccttaaccacatctgcaaaattccttttaccaagtaaggtaacattcacaagtttggaggattagaacttggatattgttggcgtgggcataatatgacctgctctaccagagttcagcaatctatagcctgggggtcagccacatgtttatgtaaatagagttttattagagcacaccaatgttaattctttacatattttctgtggttgctttcctgctacagcagcagagttgagttacaatagagctcatatggcctgcaaagcctaaaatatttactatctcatcctttatagataaagattgctgaccttgtaactagatttactgtcaccttggacaaattagtctcactaagcataatagaatcataactttatagactgggaaagaaccttaaaagtaattttggttaaactctaccctatacatttctctgcgtaaatcaccttttcagaaaaactggtgaatggccattcagcttctgctccaaaacatggaactaaaaggagctcactgtctcatgaagtagctcatgtttatttcaaacagctgtaattcttcaacaaatagaaatatattatttatattgaccaaaaagttgcagtcttttgactttcttgcctagtcttatttatgccttctgagaccatagagaataagtgaaatctctcttctatctgtgagcactttaaaaatttgattctgctatcatatctgaaagttatttagttatttgcataaatatgtggagtgtcaacaaaggagaaagagacagtgttctcagatcagaaccttgctgagcaagctgcctggacttagctgtcactattgcatggatgcaagggagtcactgcccctggtccagcttttatgagtttctctatttgtgcctgggaaattcaccaaagagggtggggttgcacactgttaacgtctccctttcagatgaggcactcgtatttccttgttcaataagccatgtaaatatggctttcagttcacacagcgtggatgcccaagcctcaaatccctctcctataattctgattccatctccaagagaattcagatgctgttagtagtctgtaactaaagcgaaactaagaagctcaatgaaaccacagctcctctgttaatcggggaaaaccaaactcctctagagggcactgtagcactcaccgaattctgtgaactgagaacactggtttaagagaatctgaacagataccagctcttaaagaaaactgtccattccctgggagtgaggttagccagggggacagagttaagccaataaaaaggggctcaaaagagctaacttgttactagagctacaaaccatgtttggattaatctccggtgtcctatcctaagtctaaagcttccctggtgctttattcactattaattcctgtatccgacaatatttactgaatccttactgtgtgctagcctttgtgttagggactgatggaaaaaactaagacaaaaacaaacaaaaaaactctgccgaatttctccaatttgccttgaagtctcattctcttttgtttattaataatccttatctaaaatcccttagcaattggagatctctttctccttcgttctttatgttgaatgatgtcttcatcatccccattagcaagttagaagaccgggagtaactttatacctatcctcccttctcttttcaattcggcctcccattctaccaattttacttaacatttctcaggtctatcctactcatttccattgctccttgccactgccccaaggtagcattatcttacttctgctcacctttccaggtttatctatcaccatttctcattatgaatttacatccaggagtactgaggtgcttgcaatttcataccctcttctgctttttcttttttttctctatttttgcccctccccgacttccctggcttatttctactcatcttttaacgttcagcccaagcatctcctccaagacttctacttaaaattacccttcccatcccttcttctgctaccagactagttaagttgccccttttctggacctttagagtctggatacatctttattaatgctgtttccgttttttcttgcatacgagattgtgagctccttgaggaccggggcaattctataagattcatctctacatccttgatgtttattccagtcctggaacatagctggccctcaatgaatgttatttatgtcaatcaatatttaaatcaatttgatagtacccatgagctgaggccccatagagaggaggggtgtacaaagagaaatgtcaataaattgacctatatatcttgggatatatctctgggcctcctacagcagttctccctcagatgatgaattttctgacaatgatgtgcattactgaaacatattcctttcattaatagttaggtttcaacagtaataattaggataaccatttctctcactgtttccacaactggaagaaattcctaagaaaggaaggtatatgaaatttgtgatgtaggagacagaggccaacttctttcccattgtaaccagcaaatactgagttatgtaagggtccaaagagaactatcatagcaaagtgctggcagagattagtgatgctttactcctgttttgtttaccataatgaactggtcaataaacatcacaaattgtttatctatataaatcttgacagattactctttatgaaatccatttagcaagcgaggttttcccataaggatgaaaaatgaagattttaaacagattgcgggagaagctctggctgtaccaagagagtcagtgtaataaaggtttctttatattaatattacaaaaaccatttatcctggcaaaatcaatattgcaattcatcttagtttggtgtttctctttctaagcttaaaatgtcttttcctttattatgtataattttgttttaataaatgtgaaatatatttcatttaggaggtactcttgaggagggataacttataaaatgacatcaaatttgtagcttatttgctaaagagtcttggaagtgtttaaaattatatttgagtggctgagaaatctaaaggaatcattttgcttaatccttaattacaaaattatccctgtgtcctttggggtaaaaacaaactacaattttcagaaaagtcttcgcttgtgaacttcatttaggaaaaattctctcttactgaagtcaagtgattataacaagtcagataagttgactataacaatggcttggataagagactataaaatcaagaatagacacatttaattgctcaaaacattgcgtgctttggctggaagaaaatagaactacatcaaggaacggaattatgttatacattggaagctattactctaaatgtactgtatgtaaaataagtgtgattgtctcatgagtgaatggtaataaaaactgaaatactcaagagacacttattcatgagtggtgcagttacacatacatatatacacacacacacacacacacatacattgagagaagcttttctcttattgtttatgctcactaatattatattaaaagcctataaacaatagactctacataatagcctataaagaaattaagagcaaatcaagtatttttgcatctataattccattttaattataatacataattttcttcagctctaaaacttaacctaaacaaaacatctatttgaaatggaattctgatgtaatgtgtatagataaaagacctaatatagttgtttgaagggggaaaatgtccttttatcatgaccataaaaacggcaaactacagtacagtggttttcaagaaaaactgtactttatttattcccaaggggatattagtccataaaacaaatttgcagcttatttggcagtcttagcttttatcagcctttttaagggtgttgaatgattacccaagagatcacactgtaaaaatggcagtggggaaaagtaactccatccgttcagcatctttattagaatatataggtgaatccatttgatgttgttttaaacgtaccacaaggagagtaccttttaaatggtgagtggtcttcttacatgtgctgttttgcttctctaatacctcatggcaccaacgttgcttatcctaattagtgccattggcataggctacatgtttgaataattcactgtgaagaaacaagttttagtttctatcatggcaaaatgccactactggtatttttacaagcaactttgggtccaagaaatttaagttgcactaaagttatcttactatatttatgtcattagcatcttttcataaatcagaataatgctgtattctccaaccattatggataactaagtttagttcataaaacagaaaatgaaatataacccatattaaggcatcaaaaatatttgaacctgtctttctcaagcaattttcttagtgaaatttagtcttcatcgaactaactatagaattttaagatttttagggagagcaatgatttacccctgattttctatttcgcaattggagagtcacttgaaaagataattttatgggtacctaatctaaatgtttagctgacaggaacactgcttttgtaaaagcaaaatttacagcattcttaattgaacaactggattcaaactaatccataagatatattgtgggatgtaaaaaagcaatataatatctttttttgctattaattagtttataaagagaaagctttatacgggttttaccaggaacagtagttttataaagatcttttctattttcctttattttatgttgattctttgtttgtttagctcaagcattcttttcaatatattggctaaaacaagccgtcttactctacaatgctattggtaggtgtaacttatactatgaattattaatcaaaacactattctctttgatggtttatttgccttgttttcagatgtcagccttgtaattgtcatctctcaggagccttgaatgaaacctgtcacttggtcacaggccagtgtttctgtaaacaatttgtcactggctcaaagtgtgatgcttgtgttcccagtgcaagccacttggatgtcaacaatctattgggttgcagcaaaagtaagtgaactctggttcagtgctggtgtgtgaagcagcatcatacaggggactgcatctcattgttttctttctccatttagaacccatcagaaaggcttagtacaatgtgaagaacgtaggtaagagatggaaaaaaatacactgaatgaaatatgtctgcttttccttgattagacaattggaaatggtaatataattatgttcatggtgggaaatttacaatagttttttggagtgaaatcaacaatgaggtgattaaagtcctaggttttcccagaccaagggtcttcccaggacacaagacttttaatggtaaaatcaggactatattggttaaaccaaaacagttggtcaccgacacaaagacatttccaggtaagttatttttttttgacaaataaagggtgaattcttgtttattatatgtttgatattcttccatcccccaaattttgtgggcagtattataccattagttgtttatcgatattgtaataattagtatcattcgtcacgcatattattcatcccataattcatgtttctttctactttaagtttcactcatttaaatatctctcacatttatatttttaattccttaaagcctaagattacatgtaagtatcttttgacttttcaacatcgcttttcagtaccttgaattgacctcacaaggtcacctgcagttctacaatttcataacatattgaccgttttcctatatttacttcaagatcatacatccttaccctttccagaatccctaagaaatgcctgctgggaacatgtggtaggagccctctacaacatattgtgctatgcatattctccttggggtgtcctgagactgtcatgagtcacaatgataggaaacgccacaagtcatgacagatcatcacaaaccagcatgcctggaactctgctatctacatttaaggggggagggagaaagataagtaatgggatattggactccacaacaactgtactagattttgaggtaatggaaagcaggatatagctagtgattaagaagacgtattcatattttgtacctgtgtagtttctcttcagcatcccgcatttcatcagtccctctggatttcagtataagtaaaactgtaggtatttatgcttcttttgggaaagaactgtcataattcctttcatgtataaatacagtctaaacataaatctggacttcattggccacttaattactatgtgtcatttattgattagcaatacaattgattgctttgtatgcaacaaaaattctagcatattccttttggatatgagttatggatcgtcatttataatggaattacaatacctaatcttagtgatttctgattggttctgccactaattttgtgacaatattggcacctgctctactttttgctacctattccttcttgcatttgagacatagtctgggaattatctctcaggcaaaactggatagtcatgtcactggaaagctagcctacaactcttagtagtggtagacatttaattttatgttttattaactggacattctttccaagtgtttctgatttgttagaatttttaaaaactctcacattcctaatgattcttccctggacatattccttttggttttttatctctttaaaattatgatatatcatactgagcacagttcttcaactcttgtggttgttgctgcttctgttttaggtttttatttaacaaaatttttgaaacactgtgtaaagttggaagctcagcatcagcagaggcaatttattagaaacaaatgagacaactttcctgccttcagaggaggtcaaaacatagctagagtgatggacactgataataggaggggagcagaaaaatgtaaatggtgggatgaggatgaagggtcccagccttctctcctgttccagcttgattttcacatggtacttgtgtttgatcctagcagaagccagccagaacaattggcttcacaaagatatgatgaaattgaaaggaatgtagtgctatctattgctgacacagtgaactacctctgactagtatttgtctctgtatccaacagatgtcaagaaatattttcatttaaaattaaaatttctcatggtaccccaccccctacacagtttgggaactgcaggattataaccctcattatatcttctaggggccactagcaataatttagtaatatcatctgtgatttttatttttggtgggctgtcagggtgggaatcctaggatgtaatttccaaaatgcaagaggattgaatgaaaataaagtagttagaccttttcttatagtaaatttcccttttgggtgattcacttctttcctttaaatattggtatcatgctttcaaaatgatagtcattcttcttgataggaagcaaaacaagaattaacataaattaaatagtcctattttctgtatgctttcctagcgaatgatattctagttagttcaaccatctatgaacctaactaaaattatacacatacacacacacacgtatacaattagccacttattgtttgatagtgtttgtcttcttgacactattctcattgttatttattcatctttatatccacattttttctttatctctccttgccagagagcctcttctagctctccttttattaacagctttattaaagtataatttacatattatatatttaacaattttaagtatatggtttgatggattttagtaaatttagacttgtgcaatcattactataatccaattgtagaacacttctgtcatttcaaaaagttcctttgtgcccatttccagtcaatcatgactcccacctctagccccaaacaactagttatagggtctttgatgagataattttgcctttcccatgagttttatataaatgaaattatacaacatttagactttttgcaatgtataggcttttgtatctagcttcatcttaacaaaatgtttttgaggttcagtcatattgttgcatgtctcagtagattcttttaattgctgagtagtattttatggatacactatattttgtttatccattgatcagttgacatttagattgttttcagcattggtctactatgaataatgcatccatgaacatacagttacaagtctctgtgtggacatgcatctttatatctctttatatcctgagaataaaaaggctggtttgtataccaaatatatttttaatgttttaggaaactgccaaattattttccaacatggctgtattattttacatttacattagcaacttataagagatccagttactctatggtctcagcaacatttggcattgactctatttcattatagccattcagtgagtgtgtagtagtatcttgttgtgattttagtttgcatttttcctgctgactaatgttgaacaacttttcatgtgtattgtcattcatgtgatttttggcaaagtatctttgaaatattttgcccgtgttttagttgttagtcctcttactgagttaaagaattccttattaatttgggataaaacttgcaaatagtcctctcattctgtggatttgtttttcattttttttattggtatactttaaaaagcaaaagcttttacttttcatgaagtcaatttaccaagcttttcctttatgggtcatgtttttgtgtcctatctaagaaattttggattgactcaatgtgaaaaaaaaaaattctccatttttatcttacagttttatacttaaacatttacatttagatccatgaaataatttgaattagttttgtacatggtatgagttaagcatctaagttctttatttcatttttattttttgacacataggtatccaaatgttccattaacatttgttgaaattgccatcctttccccattgaattacccaagcatctatgcaaaaatgcagttgaccccatagctaacatcatattcaataatgaaagactgagatctaagatcagacataatacagaaatgcccacatattagccagagcaggtaatcaagaaaaagtaagtaaaagtctcccaaattagaaagttgattttctttacttgtagatgatatgattctatatgtggaaaatccaaacaaattcacaagaaagctactagagctagtaaacaaattcagcaatgttctatgttacaagatcaacacacaaaattagttgtgtttctataagccagcaatgaataatttgaaaaagaaattaataaagcaatttcacttataatgcatcaaaaatttaaccaaggagatgaagacttgtacattatctgttttctgtgtttccaggaaacctatagtataattgcgcaatgttatttctatgcactgttccttttatgcttagccatgtgctctccagtgtctcatgagtttcatgcaggatctgtgtgtgatcacttttctattaggatgctaagatagaagtaattttcccattagtatatattatctgtggtaataaatatattacttattgccaaataagccatttataattcttgggatgtaagaatcaaggatgccttccagcacactggagggtagaggaaataaaggtgatatttattgaacaattactttatacacatatacacacacacacacccctacatacatatgtgcatgcacacacacacacacacacacaaacacacacacaccttatcttcaaaataaccctgacggggagacattatcattctcttaatataaatgagaaaaggttcagagagtccaatcaatatttgactataatcatacaactaccaaagttccaaagctggagattcaagctggtggttcccaaagagatggatctagtcacaatattatactctcatcccataaaagagagtctggcatatgcaaagaccattcttggcaattttgatgagtgaatatgtgaacattttttaggaattctacttcaagcacataaaggttcaagttctctcatgctcaagatttaataatattattctcaaaagtgttggtaagtcatctaaaccttctggcttatgaaaatttcaacttaaataccaaagaggtactatttatttatgctgtggagtcagacaagattgtggttgacatggtcatagcaagtaatcagcttaaatgtttggaaagagcctctgtgtgtgaagaacttttgttgccaaggatattttcatgtaatgcaaatcattttctacaccctttgacatgggagtgaaacatctatctctctttcattttcattcatccccaaagcattttgctgccttagaaaatcatctgaaggtcagttttgattgctctaactctgaaatctgttgtgttcctgatagcatgcagagttttagatgaaatcactaatattcactaaaaaatgttaaattaccatgaattgcaaggttctttgagagtgctgtaaatgaggcagttgatgatatttgtggctccaccaagaacaacaggatttaaaaccctaaattaaaatccactgaaagggtcaaatgcattttcagtgttcaaccgatcaaagtgaccatatcaaatatggaaaattcatgaattcaaaaatgtaaggtgttattcggaaataattcttttctcatgtgtcattatgagattgttgctactcttttcctatgtctaaataggcatatagactgttggaatgttaatagaacaatgcaaattccaaagaagaaaaagacaaaaggagggcaatgagcatgtatctagtttgaatattttaaaacatatgatgtaaatattatctgccttaggatcagactttgtctttaggaagcctattcatagtacatggaattttatatattttacattcagtgctgtgcagaataaaacaacattttccccctctgttctcacaccaccatcaacatagttgaacaagcaattctgcagcattaatatcctacaatccagttcaactcttgcgctatatacctggaagtagtggcagattccacgggtgaggggtcagtccccaaggctgcccccaacttctaacaccaatcacaagctccaggttattttgcctgtgcttgtaacccactggctataaattggggctcctatgactccctccttgggttcaattactttggcagctcagctcaaaataaggaagcacttatttttactgatttatgatacaggatattgcaaagatacagatgaagcaatgcataggacaagatacgtggaaaggggagctgagcttccatgtcctccctaggtgtcacaccctccaggaacttccacgtgttaaactacatggagctctccctgtacccccaccaccccccaccaccccaaacaccctttttgttgttgttgttttagacagagtctcgctctgtcgccaggctggaatgcagtggcgatcttggctcactgcaacttccgactcccgggttcaaacgattcttccgcctgagcctgccgagtagctgggattacaggtgtgtgccaccatgcccagctaatttttgtatttttagtagagacggggtttcaccatgttggccaggatggtcttgatctcctgacctcgtgatccgcccgcctcgaccctttatagcaacttcattggataggcatgactgaagcatggatgtggcagactaccacaattactacttgagaccatcactacaacagttactactgttactatttgagactgtcattacaagactgaatgaaggaggatgaacgcagaaatgaaaacttaaaacaaaaataactattttacaggaagggtaacatggggaagaagaagaggggtccctgcttcttgtgagcaagggcagctgcctgagctgcttcagcccttcatatttattgggtagaaagagcagggaggaggagggcatgattggtcagctgcttgattgatcacagggtcatattattactaacaggcttcagatttgcctaataacaagaaacacttgtgcctgggtcatgactgccctcagcattccttccgggtgcagacgcagtttgtcagcttgccaacatcctgctttcatgagaacagtttgctgtttactcatatagcctccagtggtatacttagttgatcacgaccctcattcttttggccttcaacacatggacaactatgtagaaatgtgatttaaaaaaaaaaaggagtatgatttcatactaatcgactgagtggggaaaccctgcaaggctgcctattcagagtcttcttggcctctctctgcagtattcattcctccagggcatggggcaggactccttctaaaatgagggtctcatgacccacagtcagacaaggtaggtcagagaatttccttatggccggctctaagacagaaaggtggaggaacattagagtatatttttagtttccctggcctgccttggggagaaaaaggaacaggtagaagcagaacagaacagagacagaccctattttctgaggcctacttctgaagcctaaatctccccaatattgtaacaaaagactgtccttcacctgtatcactcttaaattgttctgaagctgcttcaggacccttggataaaagaccaatacttcaacaaaagataggcttattgtgttagtcaccaaggaaatagcaaaggctatggaagttatgagccaggaaccatggacaaaaacgtgtgtgtgtgtgtatggtgtataaatatcaaagtgctcttgaaatcctgtcttaaaatgtaataatttgattatattatatcttttagacagagttcatatattatatctattaaaaagagttcatcactcatgggtcctggtgaattagcaatagctctggggtggaagtctttgcttagtttgcagaataacttcactttactgttccctacttttccactttgctctgtcctccaagattctatgtggtttgcatcagcagcctccattgccctctggccatcagttagttgatttcagctgctaagagggacccaccaaacatctggagggcaggtggaaaaggaagtcaggatatttaattccccgctccctgtgtccatgtagaagcagcctcaagctaactgcatccctccatgagtggtcatagctcctgtcaggtgatgctcttcatacagtcatttctgtccctgagttctgtccccatttaagctagagatagtgtgcagagaagagttaacatagcaagcctgactgcttatttttagaaagacctgcttacaaagttggcctttggctgacatctggatccccactatccccagaactgataagagaggaccactgcacttaaacatttgtacaaagtacggtttatgcttaacacctgctttccttgtgggggtcttaaatttgggtaaatgccagatagaggctgctcataggaacagcccccaataaaaaccctgtgcactgagtttctaaggagcttccctgattggcaacacatcacacatattttcataatgcattgctgggggaattaggcccattctatctctactggaagagaattcttggaagcttgtgcttggtttcccctggacttcattgatatgccttttccctttgttgatgaattctgtaacatttcactgtaataaattttagccatgagtaggactatatgatgagtcctgagtcttcctagtgaatcattagacccagggttcagggttggcttgagaaaccctgacataaatagcaaaagagctctgcagttctgtacctgagagtactggaccatctcttttgcccacccttttgaaagtggttcctttattgagctctccccaagttactttttttgagtgtgctttcttttactgaggcttctagtgactgtagatatttcatataaaaatattaattatttgatggattcttttctgtaccttacatttacatatttcttaacaaaaagatgaatggtttaaaagtaaggtaacacagcaacctgtacccttgacatcttatttaaggagaatgtttgattaggttgtgcttctttaaatggatgggggattgtgcatcttgtttaaactagaaaatagtacgtaaactggtggttgattgtccctaaaaatatttagctgttgtttttctcctttatctttgcgtattctggtgaaaaaaaagaaaattcactctcaaaagcagggagactaagaaaaatttacagtgacagaacacaatgttttcatggtatatatttatattatagaaaacatcacttaagtagtgagatgaatgttcttatttcttatgtgcctgataagcaattgtattacatcttaaaaacacctctaacaggtgatggtacattcatatagtatattcaaatcgtttcttgataatatttagattatttaacatccatagctatttatatcaccaaatattattctttcttttacactgtgctctctgaagcaagataaagcattgtgcttaatggaatggaaagcttcctctcaaaaacccaaagattatgctacttaaatttcaagtttcaatggaacttatgtcaacttttaaattaactatgtaaaaaataaatgttgtgcatccttggatggtttctcaaaaaaaaaaaaaaaaaaggcaaagaaagaaatgcttaatgtaaactatggtggttttttacccccaactatatttatgccagctgctttgacctaaaaagtttttttatgcttatagataaaaagctttgttttagagaactcatgaaccctttgtttattaatgtcttggtaaaccacatgtcttcttgataaagcaatcctgaatcagaaagacctctttgctggatatcttacttcagtttgcttttctgtttattgattgctttgctaataaatgctctcttcattgtaatttagctccattccagcaacctccgcccagaggacaagttcaaagttcttctgctatcaatctctcctggagtccacctgattctccaaatgcccactggcttacttacagtttactcagggatggttttgaaatctacacaacagaggatcaatacccatacagtgagtttaagggtttggtaatagaaataaatattctgagaattgacacattagttaagttctttgacattgaggataaatgctgttgtggtttcctctgtctggcacagagtgtttcaaacagagataaaattacaaatttcactagtaatcaaagaaatacaataaaaatgagatgcttattatctgataaatactaatgcttatcacattctcaaagatgaaaaaaaaatgaccccatcaagaattgatgggaatgtggggaagctggaacttttataaactgctgaggtgtctgtgtgagttcattagtacaacttttcatgtacaataatttgttaaaatctatgaaaaaatctttccttttaacataacatttgacttagcaaacttattttaggaagtttatctcaagtgaacagtcattaagtagacacacaagatgtccatacctattctatttgtaacatcaaaatattgaaaatgattcagatgttcaacaatgtttcaggaaattatagtatatggcataacagaatcctggtacattgttaaataaattataggctatgatagcatataaactgataccttagttcacatatcaataaatggaaaatgttcatgacatattgtttaaggcaggggtccccaatccccaggctgtggacaggtactggtctgtgacctgttaggaacaggaccacacagcaggaggtgagcagcaggccggcgacattactgcctgagccctgcctcctgtcagttctgtggcggcatgagattctcataggaacaggaatcctattgcgaactgtgcatgcgagggatctaggttgcacgctccttatgataatctaataataaatataatgcgcttgaatcatgccaaaaccatccctcctcaccttcccatcctgggtccatggaaaaactgttttccatgaaaccagtccctggggccaaaaaagttggggaccactggtttaaagtaaataaagttattaaaataatctgagaattataccattttaatttacaaatactggaagacataataaatagatctagttttctctaattgtaaatattatagaaaatgtatcaaatatttctattataatgaattcaagttttttaattctcaggttaaagaactattaaatctggcagtggagtactaacactcaagcaaatagtgtaatttaatacacacattgctgtttccgcagagatagaacacagcaacataaacttttgaaagagaaaggatataaacaagccatcaagcctatctttgcctttgtaacttttatgaagattttaaaggagcttatagaaatcaaattattagaattcattgactttaaaaaacatttactcagatgttttagatacagtttccctaaagacagaatgaaaaaaataggaatttttacattattccagctctatcttctctgatttttgcttctagccatgtttagctacacactagtttaagaaacctcggaacagcaattccaattcaagtttctattttgttctcttcatttaatacacagttttccaaattctactttaaccatgcttaattagttggagaactgtttaaagctctgtcgaaacactgaaattccataaccttccttaaaatggttaggaggatgccttgttttaacattttaattgactttaaaactcctgcatcgcatagagttttattttgtatgcattatactgggtttcattttgcacctaattcatataactggaatttagtttcttatgtccacccctttctcttggctctacatgtctcttcagtattccaagtcttctttaaagttaatggaaactctgaacttcatgatgcagattgcaaagggaaatgaacatctgtctacatctgccatgttggcaaagtatcctgaaaacctgctactagaatgtttattttcttccaaatatcagcatgatccaggtgtcctgaaacttaaacttttgtgacagagaaagagaggagttataaaaatattgaaaatgattttgaagatgacagtaccactgattatttctgaagttgtgaattagggtcaccctactttccatacagcttaatgcaatagcaaaattaaacttaaaactatcaatgatattattcaagccagaggcatgatttccatagtaacatattgtgatctattttatagaacatcacatgttagtacaacattggctgtttttgacgattgcactaataaggaatccaaataacattttcttacataataaatgtgtattcattcactaatcagacatttatataatcctattaaacaaggtatcatttcctaaaaccatatttttcattaaaaaatgccacttctggcatttcttgacaatcactgtaattaatgatgtgaaaattatctgcatgatggcatttgaacagtaagaacaattggttaacactgtcagaactttgtatcattctaacaatagcctcatgtttattactctatttctagtgcgtggctagcatgtgtaacatgtaaaggaaacactacttatattcagctggatgaacacaaatctttgggttaaataaaggcattaggaattataggtggagaatcattgaacttttcaaagaaaattaatagtgttgtcttccaagcaagtttgatagtttgtttgagacctttatagaattcttttttagaatggaaactttttctagctggcctaatgtactatgggattctctaagacatattttccttcttaggatcatgatatactggtgtaccatctttaaagctttcaaattatttgttattataatagcatgcaaataatgaataattttaaagattgtgaataattaactttaaaaaacaaggtatatctttacgttttatttaaggtagaggtcaagctagcgcttcgagaatcatacataatcagccctaacagtatctctattgtagcccccttctgggttgctcataggtatcttacgtgtcataggaaggaagtgaacagttattggaggaaatagcactcttctgttagtgttgcaggtttagggagtggacagtaactcatactgttttttggtgttgttcctatttgagtttggaatcaaaggagcactagacatagtaggcagatcaaatttaaaaataaaaacgatcttcattactgatgaaagtcagattagagactatatcctttttcctgcaggaagacaaattagaagagagaaaaatcaatgggctgatctgcacataatttgctccctacaccctgactccccagattcacagtcagatgagttgttcctcatttgggatggcatgaatggggagatagcccttaaatgtcactttagagaaatccttccacaggaactagaggatgattatttttacatgtaacaatgacttctatcacctacagatattatcgtagtttaagcttagaattttagacaaccaaatattttaatgagccctgggatttcatttctacccttattcatttccatctttaaaattataatttataatctcatactacatcaagggatcaatgtaacaagtggtaagatgattcagttagctctgagaggaataaatgaagaaatataagatatagagacaggatgagaaaacagaagagaagatgacaggcaactgtttttataaggctcttaatattcttaatgcggtagtttccccttatccatggttttgttttctgcagtttgttactcatggtcaacaatgttccaaaaataggtgagtctacagtacaataagatgttttgagagagagagaaagaccatattcacataactattattggggtatattgttataattgttctattttattttcagttattgttgttaatctcttactctgcctaacataaattaaactttatcatagatatgtatgtataggaaaaagaacagtatatatacacacatatatatgtatgtatatatatgtgtatatgtgtatatatatacatatatgtatgtgtgtgtatatatatatagtttaatactatttgttgttttaggaatccactggagatcttggaatgtatctcctgtggataagaggggactactatattctttcctggaacaatagatcaaatatgtatagaaaaatcattcatgtgtttaataaaattttgttcagtgcttattccagaccagaaactgtatcagtcattagaaatacaaagatgaaaggaatagttctccttactgagtggggagacatataagtaaaccaaagtaacaatagaatatataaatgttgaagcagagtaaacttggggtgttaaggaagcacacggtggcttgggaggtgtaggaaatgtaaccatgcctgtggtggcaatgatgtgatggagaaccactgaaagtttcccagtaaagaaagaatataagctgaattagccagatactgtagttgaggaagcgtgatggtcatgaaataaattttgtattaaaagaaaataaggtatattcagcaatcatgggcagttccatgtagctttggtaagtggtacaatgggggagtgctacaaaccaggagggtatcagccaagatcacaaatcagtgctgagccaaggactgtaaatgtttctctgaaaatgcagaagtctgtagtaacagcaaattttcaaattcagtgttaaagatccgtaccccaaccaaggagagcaactaccttgagataagcactcttttaacctgagtattatttttttgttatggatcattaatggatatcctattcataccctttcaaatgcttttatatctttcacactataaattgccttatatgatattcctacacaaatgcatatttccatcccaattctatctgattctaatttcttattaagtagactgctcttgtataatacattctgatctattaggattatattccacttttcagatgctacaaacattcagcaagtactgtacttcttttaattgtcatcaggttataagtcttccaacttccagtttaagcttatgccagacaatcttttggaatattcagcactgaaatttatttttttcttttaggttttggcttttggcatgctaaattattttccatcgttgttctagccttcagtgatttttcaaattttgttaatgttttcaacaaccttattgtgggataagggtaactttaatctaatctagtaaatatttattgaaataacaatgagccacagctgcacgctctctagaaagtctgaatctcagccctaggggacttttccaaatatgatccttctttgggtgctctgccttagcactaaggatggtgactttcccctgtctcttctattcctatattctttagagttttctgtaccacttagaaagtaaaaccaggcgacctctggtacccatggtacaactgaaaacagccaccagagagagaactgtctcaccttcctcggctctatcagggtcatctctgataagacagtggccctcacctgagtcagtgcccaaggtgccccccacaacaccagcggaggcctcctccactgagcagtcggaccccagagtgctctgtaggagctgtagactgggaagaagggccgggtgtggtggctcatggctgtcatcccaacactttgggaagctgaggtgggcggattgcttgagcccaggggttcaagaccaacctaggcaaaatggtgcaaccctatctctacaaaaaatacaaaaattagccgggcgtggtggtgggcacctgtagtcccagctattctatttgggagactgaggcaggagaatcgcttgaacccgggaggcagaagttgcagtgagccgagattgtgccactgcactccagcctgggtgacaaagtcagaccctgtcttcaaaaaaaaaaaaaaaagaaaaaagactgggaatgcctaggtttacacgatgggttatcactccaaagatttgtgtcttttgtggccaatggcagatccaggaaagaaatgaaagttgccgatggggataggctgggggagagcaatacagatgtgtatgggaaaccccaacccatatatattgtaaatagatggactaggctaaacattgttgctgtttcagtcttctgcaaactcagcttttccacaataaagctctatctcctgtcggaaggaaggaaggaaggaaggaaggaaggaaggaaggaaggaagggagggagggagggagggagggagggagggagggatggatggggggaggggaaggggaaggggaagcacataaatatgctgggaccttcatattgctatagggcacccctgcttaatggaaccctcctcgcatctccaatgcaaacagccccatggcggagcaggcagcagccactctggtatttgtgtgtttcgcagtcctacagtgtgtttcctgtccttagagaacaaggatttccagccatgtgcctaatcacctccactccctatcttattttttaaaaacctctttgtagctgcttctctttgccctcacaatccttcatgcatagaagtcctgcttatctaaaacttctgttgtgtaaattcctcattgctgataacaaatgtctccaaaatttagcagcttaaaacaataaacatttataatttctgtaggtcagaaaataagaaaattttccattcaagatgttggccaggtgacagatttaccccttggtggtagtttactgacccttagtctggtgtgtttagtgtttaacaagcaaacaagttacatagaggaaacatagttacttttctgttttggagaaccgcaaggactttctcttagaccttctaacaaaaggacactatgaaaagcaaaagaagaactaaaacaaacatctaaacattctttattatgaatgatactttcttatactcaataataaaagcaatcaaccggtatttacattatttcaattttaaaaatatgaaatgtatccttaatcaaaagagtagattggtatagtttatgtaattaaataatatgataggaaagcagttagcaatgattcttcaccaacttgtgaaatgtaactttgttttttttttttcttttcatttcaggtattcaatacttcttagacacagacctgttaccatataccaaatattcctattacattgagaccaccaatgtgcatggttcaacaaggagtgtagctgtcacttacaagacaaaaccaggggtcccagagggaaacttgactttaagttatatcattcctattggctcagactctgtgacacttacctggacaacactctcaaatcaatctggtcccatagagaaatatattttgtcctgtgcccctttggctggtggtcagccatgtgtttcctacgaaggtcatgaaacctcagctaccatctggaatctggttccatttgccaagtacgatttttctgtacaggcgtgtactagcgggggctgtttacacagcttgcccattacagtgaccacagcccaggcccctccccaaagactaagtccacctaagatgcagaaaatcagttctacagaacttcatgtagaatggtctccaccagcggaactaaatggtaagaatccaaggctgagattcccctttttggtcaagacatgaatgagaatctattgtaattgtgcaattaggaatttggcagttgtattcctttttataactgcacaatataataattgagaaacagtttctaaagatataagatagtatttgtcctggttagtggaacaagtgtatttcttctaatctaataacaaattccattcaattaaattgccccttaaaaggctaatattatctttgctcttaatgacatctgccataacacaaatgatgtttataatttgaaactcacttatgaaatgcattatatttgactgtgtcacaagttagggcacccacaagcagtacatttttctcttctaagcaagaaaaagatataaaatgatacaaaaaatatgtatataagctaactgactccattaagttaatttttgcattcatgcatttgaacccttggttatataggccagacacacattcacagatttttaatcatttatatcatgtacatattatagcaaaatctttctttagatttgtaaagttatttggtaaaactgggtagagattgactataacatttatgcaaacagggcttatgttaaacaagttaaattaaaacctccaaatttgaaaggatacagactggagctataatgatcaaattccccaaaagaactggccattcttaacagaaattgtgaatatcaattctgaaaaagattgaatttacctatgataaagtgtagttattttttgtctatgtgttatccattttggtttgttttcctcatgagtatgcctttaatagtattttatacattcatctatatagcagtttgttgtcttctatgtacctgtcatctagattactaaactactaaatcactacattttgaatgctaaagaaattgacagtaatctaattagaaagacaatgaatatccagcactctttaactgacctgtccctaccctacccctaaagtaacccctttgtctgatgagttacgtaggttcactatttaatttctctaggaataattataagatatgaactatacatgagaagactgagatctactaaagaaaccacatctgaggaaagtcgagtttttcagagcagtggttggctcagtcctcattcatttgtagaatcggccaatgaaaatgcattaaaacctcctcaaacaatgacaaccatcactggcttggagccatacaccaagtatgagttcagagtcttagctgtgaatatggctggaagtgtgtcttctgcctgggtctcagaaagaacgggagaatcaggtaaagatcaatgttttaaattctacttttaaaacctctgaatgcaaatgtttcctcaaattaaagtcaaagtactgtgaaagtacattttgaaaagcaagaattagaaacttccatagaccaaggaaaattttcatatatatggatttgttacataaacaactcaaggtcataaagtacttgcagcaagttctagggggcaaaagtaaatgctttagttattaattcatggggcgaaaatggcttaactatagttatagtcttctgggaatgtttgtcaaaaatagcatttggtttccactcctgaagtggattggacacatgtctcatcttgctccatatacagcctaatttatgttcaatgaaagagataactgtcaccaattccacaaatttgtctttgtttttatttatctttccaaaataaatagtttagatactagattgtacataatgacagaatcgtggacatcaaaatctataattcacaagtgtgcttgtaagcagttggcatgatgataaggaaggaggacaacatatctaaattttctggattatcttcattaaggcaaaaatttttaatcctccactttattttttatattaaaacacttcaaatttcatgagcctttaagaaaaaaaatacacttttgttatgtgtttaatctgtagatatcaaagaaacccaaaccctgatctaaacttgacctgttaggaatatggaggatgagggtagctttaggttgatgtccaagggaatcatttcatgaataaaatacgcattgtgcttgagcatctcttaatgactaccagccatcttggacaaataatagagccatgatagcacaagtgatgaggcatggcattctggaaggggaaaatcaaggtcagaaatgaaaagtaatgggtgaaactgcaatactggtccctcgtaatcttatgggtcactagctaatgaaagtgcaatgagttcctttgataatacacctttggttagcacatttaaaatccctgtaaagagctcaggagtggcaggggggaaagggaaatgcatgtgtatgtaacctgaacatttcaagaaaaatttaacaaaaactttgagacattcattggggttatttagaatgctttaggtttacctctttctgaagaataatattcagccagctgcattggattggctcaatgacatatttccctacatgggaaatccagtacatcaccatgcatttttctgaactttttgaactgagatgttctatttttgtgacgttttttagatactcgtaagacttataatttcctatctatccactttcctatctttatgaacatgagcaaattcctatgagatttttattttgcaagtagaaagtagctggtaatatgaagatggagaatatactttcagataacattttaaaaagtgaataccttttacatataccagcatattcttggactttttcaaagcagaatattttaaaaggtaaaggtatttcagaaactaaatgaatgtgtgaattaaatttaaaaatatatagggacgacattcattgttttgatgttattgttattgttctcattgatagcacctgtattcatgatccctccttcagtctttcccctctcttcgtactctctcaatatctcctgggagaagccagcagataatgttacaagaggaaaagttgtggggtatgacatcaatatgctttctgaacaatcacctcaacagtctattcccatggcgttttcacaggtattgttatttttaactaatgtcctttcagaattggcttagggcttcatttggacattttttgagtttgcagaattctgtgacagaattctccctctatattgattaaacagggcattttttcttaatataatattatgtgtacaagcctccctctttgtatgtcacttgtatttttccagtataatcatatattgaaactaagttggtataatttatttcataagacttgttttttttccatttatcatgtatccttaaatattttacatgaagttgactttcattaactgtgtactatcatgttatttggacacacaataattatttaaccagtccacactcagttgatattgtattgtattaattcttttggaaatataaataacattgataaaacttcttatatgtacatttcatatacatttctacttcaaaaatctgaagaattgaatttatcacagcttataacaaaatgaattatgaatatgttcaaagttttgaatatacagtcatatattgccttctagtaattcatcccccagctagcagtagtgagaataattatcatagctaaaagttactgaggctttactgtgtacgtgaactaattcatctgatacatacagcaatcctagaggataggaggctcttgttctctccagtttacagttgtggctgatatacctctctgcccattttaccagcatccaggtggccaatagcagaagctgatggaaggatgtcaaccgaacaagttcttctgtgtatttggctgttcagtgcctcctctgagagagatgctcttctctgggcattagcataagataaaaagatctttacactttatacctactcccatagatctagccacatttttctttccatgaattcctagttcctgatccttccatctttttttttcatgcccttggccaatatttccaagccactgccatattgtccaggtacattttaccttgagacacgtctctttccacacaacatgggtgaccaggtgaactgcctgaagttctgcccactaagaggatttcttcgctctgctgtttcacagggtcatctctgacaagggttttagagcaacagctaccatttagacttgcagccacataccaagacatcctatctgtaaactaaattctgctttttttccacattctttcagctcttaagggacctcccatgggtcataggtatgagctgaggttgagccaccagtataagaatggtggatgtcatgggggcctgaaccacctgcttgcacaatgtattacggcttttggctctgcttatacccaatctcagacatccacttccattttatgatgaatttctgttgggcccttctaacctcaagacttggctgagacaattccaagattataaaaaagtagctctagctgcatggctatttggtgttccatgaccagatgttctgtttttactgaagcctgaaagcatgctagggccatttagcaaatggtatatagtttccattacatgttatgcctttgttccaagctcttggggtctatctgccctgtgattctctttctatgtgtgccttgcaacattttttcccacaatgcttacctctagtgctgtaaaaattactacatgttatgtcccaagtggctcatctgcctgtaccacaggctggacctggtgcagagccctttccgcctctgggatacactcaaaactggcagcattccatattactcagtaaatttctcagaacagtattctcaaatgtggaatatgctcccttcagaatgtgaagaggtcaactagacattttgtttccttcttagtggtggtagaagcaaggtgcaataatttgtcctttattttggaggggatatcctagcatgtctcaggccacttgaactcctaaaaacttcactgatatggtagattccttaatcttcataatattgctgtctcactttctagaacacatatgtcttacctctgcatacctaccatttcttgtttgtctgattcatttaatatgatgctatcgatataaagaatactgtcaaggtggcatttatagtttgtcttaaattggtgattaatcaccctcagatttcctttgtctttcttcagtgcattgatggcgaccagcaagatccatgcattgtccttataattactagtttccccagagtagtccttgtaattactaattccaccaaaccagtgaattaccttctactggtaactcatcgcagttcaccactaatggaagtttaagcattgcaccactagggcatgctgtggactgttagtactctacctgctgtctatgatgagatcattgtaaaccagcaagtggatgatggagctccaaaatatcattttagagtctccttcctagggccagtcctgttacgactatcttagggcaaattcccccggaagcagactcttggtagaggactgagtacaggaggtttattgggggaactctttcagaaacaacaaatgtgaagtgataaagtatgtaggattgagcagcaaagaagctgaactgtgatgcaatagtggaagcagcctcagcggattccgtgggtagttctggagctgaaatgaccctcttagcttatctcaaattaagctaggaagtcagacctttgtaccctagagtatttgtgtcctcgggctggtgtaacaaattaacataaactgagtgtcttaaaacaacggaaatttaggtgttagtacagccaggtcccccacaggctctaggagacaattcttctcttctacctacctgtggctcctggtgttccttggcttgtggcaacataactctaatatctgctgcctctgtcttcacaagtcctactctgtgtctctgtctcctctgggtctgtgtgtccgtctcatttctcccataaaaataccagtcattggattttaagctaacctgaaatccaggatgacaactaattaattacatctgcaaagaccttatttccaaacaaggtcttattctgaatttttgggagacactatacaatccactactaataggtttgccatttttttctaagcctttttaggagaccagaacccatgtacaacacacaattttattttctatactgatgaaaaagaagagccaataaataatttatgattacttatttttcattaatctgtctacgtgttcactcatttgcaattatctcatgatgaatacacaactggcataatatatatattttgacttaaacaggttagtctaccgatctggtataccatgggatttaaggtaaagttagttgtaactttcatgtggtctttgccatgttgtatctcatttatactcaatgttttattttgttgtttttactattctctggctttataaactattctttctttgtaaaacacagttttgatttatctattacttatattatagtagttgttgttctaagaaaaaaataaggtgagaaatattatttataaaatacagccttagaagtcaacctgtttgttcatattccacatctcccaattattagctgtatcacacgtctctctgcttctggttttattcatctgtgaaatgggaaaaccatttttgctcacctacctgcttaaagagcctgataaatattgacacattattattagtgattattattaatggtgtggaactacattatactttataaactagctatcatttaatggggcaggaaaataaatatttttattattgttgttgttatttaaaaggctgttccttatggctgaactggaataaggacatagatatatcaccttattctcttttttatttttatttctttgagacagagtctcgctctgtcacccaggcttgagtgcagtggcgcaatctcagttcactgcaatcttctcttcctgggttcaagcaattcttgtgcttcagccttccaagtagctgggactacaggtgtgtgccactacacctgactaattttttttttaatttttatttttagtagagacagggttttgccatctttgccaggttggtcttgaacccctagcctcaagtgatccacccgcctcggtctcccaaaatactgggattacaggcatgagccactgcactgggcctaccttattctcttttgaactctctctcctgtgcaaatattctctgttcaaggaaatgaaatcaaaagtagcagaacaaagtccaattttttaccttctcaatgattaaatttgtatctgaactgacctgagtatgtcttgttataatctttgtaaataaatagccaaaattcccagggaaaatctactataaaaataactagtaagaaacctttgcctaagaatgagacaggggggatacgtaaaagtggtgatgatgtaggattcattgtgggggatcaagctgctgtagaatttttcctacccctttgaagacttatttcatgaaaaactttcaattagatagattttataagacttataaattgactctatgtacatgataaagacaaagtctatccaagtgataattttatgctgcaagttctggggccaataatgtatttttaaaataatgtaatttataataatcatctgtaaagaaggaaaagccttttcaaaataaatattagtgtagatttcttctttcttattttatttcatcgtgggttcttgctacaaagaatattttgcttaaaaaatagttgtacttcctaaattaaataagaaatagcttcatgtactttatcctaaaaacaataccattttctaaaaatttacattgaaatctaccaggattattctaaaagggatgaatattacagcaatattcataagtttaactcagttcaaggtttattttacttagaaaattttaaatcacatttcacagaaaagtttgtatcttcattatatcaataatgattttaaaattagaaaaataaagaattacttggtatttgatgtttttcttatttcaaaatgtaattgcaaggaaatggttttaaagttttaaatttaaattattcctagagttttagaatctttaaaaacacctttatttctgaatgttattgaaacactgtattctacattccaatctcactgctttttagaacaactcatgtaacttacgaaattttaaagtcaacacctaggcaaatattccaaatgaattttattttacccctaaagagaaagtctctagaaaactactccaaatgttactgaactttacatttatctgtatttatatttatggaagattattttatatgactatgtatcagtagccctaagaaaattagttttgtactcatagttactgtcatactctctgttttaatgacttttattttctgaatataatttctagtggcctttgtacctacaacctaaacaaatttacatggttgcttttgatcacttcaaattataatgacagaaccaactctcaatgttaattgtttaataatttatttatggactgtgagtttcctgtcagtcttctttgctcaaatctgctattttcatttgaaattatatgataaagataatatttcaaataacgtaactgtttgatctaatctttatatgtttgtttatataagaaagatgattgagaattgacttaacgtggatgctcagtaatatgcttaatgtttaattttttcccctttttcttctgtgactttttttcataaagaaaatgatagtatcgatttaacatagcaacggcatttctttctgtcctagcaccatcaaatagcttgggtattactgctctgggttacttttggccaagccccatggctttgtttggactttatcatgataacaatgacaatgtcaccgtctttatctctaccattggtgacaataaccataccaccatgctgctttatgaggcaataacttggttttctcatttatccactcaggaactggattattacctcataaaacagtgtgattgtacaataatcaattaaatcctggcttgtcgagactcttcagaaaaaaaaaaaaaaacccttttcctaatggtggttggcaataattccctctgtctgaattcatggaactttgactgccaaggttatattttcacactgattacctattatctttctttctttctttctttcttttttgccttgaagctgttgcacactgctaaatcccaagaactatcttacactgtagaaggactgaaaccttataggatatatgagtttactattactctctgcaattcagttggttgtgtgaccagtgcttcgggagcaggacaaactttagcagcaggtaagcaagttttaatggatatgaaaaatctgttgcctatcaagaaaaaaaacttataatattcaacaccttctctacttgagactttatatttgtcttctcctccctcactaactctgattgcttcttacctcaacagttttaaacaacaacaaccaaaacgtaacttaaagaggtacctaggagctacgagttacagctgtgtcataataagaaatataattagtggtagagtgactccactctacaactagaaatatatagaatatacaactagaaacatatacaaatatatagaactagaaatacatagaaatgtaattagttgtagcgtgactccagggcttaactaccaacctgtgtcctagcagtgtcctgacaattgtgagaaacaatcaggaagcttcttatgaggacgttaggatacctcttccctcagtccagacattttttgtaggcttggctctactcactcctgatccatgggaacatctagaaattactgtgtggcctggtgttatatttggctttcatgaaataggtaaatgtttatctattgttttattaagaagaagcttttaagttaataaaatttaaataaaagaattgttattaagtataatctgagtagaaatggtttgtataatttgtgcttgcttcattcaggactaactggattcatacaaacctgattacatgtattagtaagacttataaaacccaattatttagcattaatatattttcaaatcagtgtttttctgattctagataaaagcttagtttcctggttatctttaaagaaatgtccatgtgtaaggaggttaagacactctagatgaattacagatattacgaaaattcatgtttacctgtaaaaacatttcctagacctcctccccaaatcccttcatcctattattaataggtccaattatgtagggttttttttctggttctggaaaaaattgcttagctcaaatgatctcatccaagtaatttatttttttcaaaattttcattaatgcaaacaactctgaaattctaagaaattatggtttactaaatttataactgaacactttgtatttttatgtattttatagatgtgcatttcagatgcatgaatacattgatggagtacctagcttgtacaaaacactcttctcctataaaactatctgtttttgtatactgtattattaaaggtttactgaatgctgaatatggacagcagaggaggactctatctcctttaaatgatacaatttcagactagaagacaaaaattaaaataagaatcagtcttacaagttggagaaagtaaaaatggagacaacggagggtgaagactgggtgtgttatagtaggggacatagggatcccaagcacgtggccatgcaaaactggaatcacatcctctcagggttgcaaaacatgtaaaaataatctagtgttactatatagccagtatcaatatattctttgtaatattcccccaagtgttcatctaacccatgtctgataccttcagtgttacagaaactactacgtctcagacaaagctataccatctttagatacctcttttagaatgtgatttcttagattggtcaaaaatatctcctagtaacttctactcaacattcttattctacttccttgggggctgtcgttaacctaatttatcatccttccaataacattttcaataacattatatccacccaagtcttttctcctttaggctgcatatcatggtggttcccatctgaacctcatatgcaatagtgtctagagctgttattagtataattcttgtagatgagatctagtctgccttttcatagatataagcaaactaaagaacctgaagagagacatgcccgtccctagaaactagctggatcatggagatgggaatagaagagcaggaaacatgtctacagaatagaatctgcctgccctatgcattagtggtaacatctgtgctaatagtatcctcattggttgcagtggcaaaatcctgttgcgtaaaagatgatgtacctgggtgctctgtgcagctctcattttagttactggtgaggcgattaaaacgactcctgtccactggcaggattgtgaagtaaaactaactagtcagagccctctgaatcctctctctattttttttatccttgaaaaatagaactggaaacttatattcgctaaaagtcatgtgacgtgaaagttagttgacttacaaaaataagagtttattcatatatgtgaggggaaaaaaatggttagccaaaatgccagggtttcaatccgggctctgccattgactagctgtgtgaccttatataaattatctaacctctgtgccttagttttccaatttataaataagcataacttatttgtagggttctgatgaggattagaattagttaatacatgtaaaatatttaaagcagtgcccatcacagttcattctcaataaaaatttattgtcatgatttttatcataatattatagaagacttttgttagtcacagtataaatgttatggaatttctaatgttatcaaaatcaaggagagtttattttacaactttgattttctaacattattataaaatataaaatggagagttctaaaactaaggattgtattgtgaaaataaaacttagaaaggcttaaaatctgaaagcattatttattatttctgtaagaagtatgtcattcagaattattatgcacatttcaaaactttgctcaaaaacagcaaatttcacatttgttggttgcaatatagagttaataatgtgccataaatgtattattactacattttattgtgaatgctcaattcagaaccatctcttgagggcttactatttaaagcactgtggaggattctaagataattatactcagcatttgggttaaggagttgagatccaacaggtaggattaacaccatggcgacatgtgctaagggctgtgagaaaggtgaaaaaaatgctatgggaaggtagaaaatgagataaatgattttgatttgggagactgagtagatacctcattaaatgctatttcagataaactataaaagaatggtaaagactttcgcagatatttactgagcacatacaatgtgctagtttctgttttaggggctggcactgttccaagtactgatgtaatgaaagcagagatttatgaagacttccctggtggtagagtacacaatagattagaagagggagtgtaataagtgtctggtagacttttttaaaaaggcaataagagagtaaatcagacgagtagaagtgaagattgaaagaagggaatggagtgacttcaaggaagacagacctggaagttaagcagtgggaaggatggacaatgatagcaaatattgcagcccatggtggtgccattaaataaaaggggaaagatgaacaaagaacagatgggagaaataaactcgtgagtttatttgatcatttgatagaaacacatccatgccaattataaccatccaggagcagaaattgcaaatctggggcttaaaaatgatgcagattttgtattcatctgcatatagatgggagctaatgctataggttataatcaattagtgaaagcagagaaaatgcaaaatggaagcccaaagaaaacaccttagtgaatattctatctgggaagaaagaagaaaggaagagtgaagtgaacagaggtatggtcagaattaggaaaagaactgagaggaagcagtatcagaaaagtcaagggaagagagaattctagaaggagaatattgtctgcagtgtcatatggtatagggaaagcaagagaaatgtgacctaaaatggatgcgaggtcactggtgactctctggggattaccctaattagcatggttgaagcagaagctggaacatgaaggattgagcagcggcaggaggagatatagtggtaaatttcaaatgtgtttttttttttttattctttgctaaaatttttcttctacccaattttcattcttcaaaaaattgtattaccttttgtttccatataaaatcctttcttttctaaagaaaaatttattttagtgtttgtttttttctggaaaaaatgtttattttctaattccttaatatattttgttagaactatctgattcttcacctgcccagcagaaaaagaaagtctcttatatgacaaaagtatggaaaaataatttttacttacagttgggtttattataaaatacatcatttttagggttgttcagatcagtgaaaataaacttatttgcttttatttgaataccaggaaaaaattataaatccatcattctttttgcctccttccttattcagtagatgaatgtgtatttctaaatgtttttccaaaacaaaacatctgaatagaaagtatagacattaaatcatagaaatacactgcagacctataataaagccagttctttagaatggtcaacaattttgctataggagagtaataaaagttgacttgcaactttactgttcatcctgctctgttttttctactattaacattgcaatttggagagtatatattattccaatgaactccaatggatttgtgggaaatttaactcttatgtctaatagctcatatgagctcattatcagacatcaatggaaacgagtgaccattcaaaaattttgaaaaagagcaccacaaattagaagtagtaattagccttttggaagcatttgaatcatgaaaagatatgttgcccccttaaatctcggtctcaaaaatcagaaagatacttgtgaagatttatcttgctgtttcattaaaaagcttgagaattataattggctctctcttgttttaaacattttttcaattaaatatatgattagaatgggtacatttcatccagagtattgcactgctgcttctttagtttcaatgcctgtgacaaagtctgagaactgatttgagagaggtgttctctcaggagcagctgcatctctctccattgcaaaatcttcaagcagtgttattaatggctttggagttgcttctgggtgtatgaaggtaatgagttgatgaactgggccctcttaaaatccttgttacacttttctttaagattctccttttaatccgagaaatttgtgcatttccacccattgcaaattgagtttagtttaaacccttcttatgagaaattacttttggagatccattcctgaagggacaatgtgatatttcccttgcctgtcataaattgacctccatactacaagcttagaagtgcccatctcgcataaaacaagtaattggtgtgcattaaattttctttctgaatgcaaagtaaaatgtataggctgtttgctgctgggttgaaaacacacattgttttgcattcgggtacataagtcttttccttgtgaataggagccagagtgattaaacaagcactcttaatatgttaatttataattttaattacaacaatcttgtatatatagtcattagtgaatactaatataaatatttttctacctttttattcataatgcataaaccaatcacccagttacttctctgaggttgcctgtttttgtttcataatacaatctttgttcttagttatgaatgcattttgttcattcctgtcttcaataatccctcattaagctagtcactttctgctccatgctaaaaaggaaaaattatcatgcaaatgtggcatgccatattaaaaagcacattaccaaacacttttgttgctgtccttcaattagtttcccttctttgaatttaattccatttgttgttaaactactgacttgatgtatggactcatgaatctgaggctgctgccaagaaagtggggaaaaaaaatcaaagcctcttcgaagagctgcagaggcgagctgaaatgaatttgcttcacctttgacaagaacacttgaacagcattggaatcctctgatgattcaacttggctaattatccaattatttatttcaagaataaaggcaccattttacaattaaggaagtgtaaagtagtctgagaaatttggtaatgacagatgacttaagtaacttctaagataaacagtatctgtgcaaaacttgtcccaccaattgttttcaggcagcagttggtgtgtcttagcatcagtgaaatcctgagtacactgaaggttttttgtttgtttgttttgctctttcaacagaaattattttacacttgtaaccaacatgtcaaatttccatggctcttaagcaatgtttaagttatatttctcttgattaaaagctttcggttcaaagcaatactttttaattgcctaatgatataagtcagttcttaggaaagaaccgcacatttaggagttcatttgcaatataactgaaaaattcattgcatggcagtaaaacaatttactgttaattacaaggagaagaatttgctgtagcatgctcgcagattgccatgaatcatgcagcactcctagagatttataacagatgtgtaaatgggatgaattagcagggtttaataacagagacacaaatcatgcagacttcaaggagctttaattgatatactagaatgtgacgggcatgaatcactcagccattcaacagcactgtaacatatggtcagctcaatatgccgcatcttaaatcggttggtgagtcgtaggttgtcccatatggtggaagcaatacatttttcatgattaaaaaaaagaatccattttttaaagaaatatgattgcaaagcatgttattgaacagtcttctgaatgccaaactgctttttttaaatgcttttttttttctttaacatggcagcttctcaaaataaataggggctactccttgtaataccagatcgctggaggcattataagaaccaaatcggtgcttgttggcacactcgatccacagcaagcctatagaaaagcgcagctgatgattgctgtgattgtcagggaaatccttcaggctggggcaaaacaaacaaatgaaaggatgatgtcactttcagagaagttcaggaatgcccagctttgtaaattgaagaaaatgagttggatgagagatccctgcttagcagggtaagaaagtggctgtgataaataataccatgacccctaaggtaacaattggatgtaacattttatactaacttcttaattaaatgctcagtcctacaggggcatgtgaaaagaagcactggctggtcatcacatagatggtagcaccaattccaagtcattcttgaagaattatttcagtatctgcaaacaggtaccctggttgaagactggtaactggtagtgtgcaaacatgtttttattggaactgggatctggcagcttttggaaaagcttttgctgcattagtaaatctgacagacttgaaaaaggaatattgcagccttagaactgtggctgccagaatttaatgtcaacaattaaaatttattttgatccttacctagtgtttattactgtttgtatacacaacagaccttactaatacagagatgcactattagatggaattaccatctgttcagagtgaaatgctggcatctgtcttagatgctaaaactaaaatgatattatttctaacaaaacaaaattaactgctttttactcaccaactttaatttgtagtgtgtagttgtatccaaggaaaaggcttgattttgaactatgtgatgacctctgtggccaggtctatatttagatatgcgactttatcaggggctctactggcctttttggcatatgaaaatggcatgtagaaatcacactttcaatacacaattatagcttcataatatactatgtatcctataagtcattaaaacaacacaaccaagctatgtaaaaattgactgaatcagagagactctactatgcaaaatattttgacagatacgccctaaaaaactgcaaggaaagaaattaaataggcaaaaaatcatctgaacaaagttgctataggtcccacagtgacatctttaggaaaatacaaactgtatctttcttctctgttagactattttaaattttctcccacatggacatatataaaaaatttacattcagtgccccctccttttaatttaaagcctaagtatcctattaaaataggtctttagcttttggaagttagagaatttggaggatcaaggacaatggtagtttccatactgatgttagatcagtgacgctactttctgagaagccagacttctattctatatatcacaaaataataaattgtgtcacaccagcatttaatgcatgtacacagtgcattaactgtaactgtagtacatttatttgtgctgcaggagacttgaaaatgatgaagaaatcgatactttgctgtcagagaagcaagtgttacgatgcatttaagtagttaattgcataagccccataaaagcttcaagtttgggtagcaaggatgccataattacagtctgagcaactaccttttattagtggtggactttagggaatggtggttgctgtcatcattgctgctatatgtgcagtttagaaataatggatcctcttctctcttcatgtgtaggatggtagttttgtgcaaattattgtgatcgccagaacaataactggttaaggtagtgtttgttcaccatgttcactgaacttctctaaaagcagggttttctttatgtcacagaacacatagacaaatcatatttgtatgccatgctaaggtaaaggaacaaggtggctgagagctgaaggggataaaccagaggggctcctgctggcttcccaggagcaaaggggatcaggatgtctggtacccattcgtggcttatgaacttagaagtactgttttaaattattcaaccaaagaattttgaaactggaagaggtcctagacataatcaagcctgtcactctaacaattgaagtaaccgaagaatagagagacctaataatggattaaccaatgttccataatcagggtcttaaagagccaatctagagcctacattttctcctttccagatcttctagtaatatcctctcctgaaggtgacttgtcaacaaagaagaaagtggcaaaatatattttattctttcttccctggtcagataatagacagtcaacaagatgatgctgagtcacccctgagagtttcgggggaaaacttttcctctttaagacactgattggtgagcagctgattctgcagcagtctctctgcaacagagaaatcagggctcatgacctggacttcttgtttgcgtcctggtccagtgcccttttgcaagtgttctggcctagcagtgtttggcaaattgtatttcctggcatagttttgcatttctgcgaaaaagtcaaaatcatattctattgacagggtgcttattaagaatgtcttatgtagtctgctccccacccacccctgaaacatagaaaaattgtttattcttaaattcttgtcatcatcatagaaagctgatgatgctttaagatattgacacagccatacagtcttcataggcaaaaaatgaacagattccttaaaaacaaatgaacagattccattttaaagaccagtacctcagaagagctttgttcagcttttagttcttatcctatggtgctcaaaatgctacactacataaattttgcaagtctaaatgtattcatttggatatactactaattatgttataaagtaataaatgctgcataaagaatgcatattataacattttataaaaatatctatacatcgaatagatagacaagaaattagattacccctattaaaaaatacaagtgctattttaaaagtacaagaattttgtacttttattcaaatagacattttattcttagaaatgatggataatgaacattcattttaaactttgtatattatccttagaaataatgaatattgaagattcgttttaaactttacatttacaagaattttctgggtaaatacagatagattttgaatatagatgaattgtattccttaatcatacataatttgaaagatttgttcttgtaatgatagcaccttatatttgtatagaaacttgttttctaaaacataaagcaaatatgtatattgttgtagaagcaattgttgtcaatgtatgtcactgaaaatgtatcctcatgttgcagatgggaaagtgggagcagatataaagggatttttctaagatcacacagatttagacattaaaaagtgaaatataatttttaaaagtctaccaaatccctttcattattcagtgttgtctcttaacgaactgttttgtaaattaacaaatctttaaaagtcatatctacttttacctatagttccttttccttgaaaatctgacgaataattcatcattaccccaatctcttggtgattctatgtgcatgtatgtgtgtgtgtttaatggttcagaagtatctatttttcttcttattctacttgtgtgtatgtgagaccagtctagtttaattgattgacaatttcacttaattcccccttccagccttagaagaactctgaaaagaataactcagtaggatgttcaccctttcaaacaggcttagttgactcctccatgtgaaactgtaaaacacacctactggaatgttttttgttttgtttttcttttaagcaagagaataaaaaatgtactctagttctattcattctcaggaattgacttctaaaggacagtcccattgctagatggaataattcctctgggaatcaagaagtgctctactacttaaagtttaaatggtaaacattaactttaatggactctcaagaatttccctattgattagaatcactttgccaaattaaaaaaaaagtgtgctctaattttcaataattattacacaaaaacgacagagttgccagaattccttttgtttagttttgtttcctattactcttaatctatattcctgtttaagacgtaatttttggattatgctactgatgggggaaggaatttgatttctgtggtggtgctgagcttcaacattatctccattgagttgagtggttggagtaaagtagagatgtatcaactttcaaacaaatgggacctggagaaaggctgctttcaaacagcaatgaaattcttcagcttttaagaagcataggaggcatattcatacttcttctcaacatttagttaaaatggaaatcctatcctcaacacaccaaatatgtataatttgtgatgctctgtctacatctttggtgtccagtatggtagtcatgaatcatatgtggctatttaaattcaaaatacagttaattaaaattaagaaatttgacattcagtttctcattctcactagctacatttcaagtgctcaatagtcttattataaggctagtggttaccgtattaaacattacagtcctagaacatttccttcattggagaaagttctattggacagtactggtaaagtagtttttggctattggatattactaggttagtagtttatgaaactaaaaagttcaggtttctgtgtcccaaaaccctagggaatctagcaaatttcaatttaaacattatgtaattggttctccattgcttccctgagcccaggactaaaaaatctttggcagctttcctttcctagttgagattatagccaagaatggcctgctaaaatcttaatacaaatatgtaactctaaactctgaagagagactctgggtgaagaaatttctgaatggcttagccttttattttgttttggattattttgaagtgagatcataacttgtagaatgaaatctttgagaacctaccatttaactgatttttagcagaaaaaaatgctaagagaaattatgcatataattcacagattcatacatatataaaaataaaatatcacatgggctgcagtggcagaaaataaccagaattgttaattatccttctaacttgatgaactttttgctcagtgccttttcttttttactaaaagttaaaatagaaccaaaatgaattgtttctttttgaaaagctggccgaaggtctaaaaagtaacaaatactaattgttctaagctgctttacggtgaatttcctttcatggtttaagggcttcaattcttatatccacatcattttgatttatatttattgaaacaggcaatgactttgcgtctgtgtatggctgtgttaacacaggtgtaaattgaaagtccacagatgtagtttgggcccttaataaataggctcggtgattatgacatttgttcctttctccacattcacctctcaaatccagcagacatacttaaagggggaataaatctcagctcacaaactcaactgtttaagggaaaaaaaaatcaaaccaaaacaaaccttcattttcaataaatcagctgttaatctgaatgagcaagttgtagggaaaaccttaatctccgtgactcctagggtttcccaggaaccttcaaagaattgccagtgtcccaccacctgaaaggatggcaaggtcccagtgtatgcaagggcatgaggtcactactgctccaaggctaagcccactgctggtggtggggtcacttcagggccagggtgctctctaggaccaagaggctgaccaaagttagttgcctggaccgttgtgtgtaaactgctgaactcacaggcttgttattttgtgctgatgctctgtttaacattcagagtgctattgcttgtttgctttcatttagatcagtttttaagctttaaaaatagaaaatagcgtataaaaggagcttttttgaccaaagaagatatacagatggcaaatacacatatgaaaaatgttctatatcatatgtcataaagggaaatgcaaattaaaataagataccactacacacccattagaatggccaaaatctggaacactgacaacaccaaatgctgatgaggctgtacagtagaaggaatgctcattcattgccagtgggaatgcaaaatggtacagccactttggaagacagtttggcagtgtcttgaaaaccaaacatgctcttaccatatgatacagcaattgcacttcttggtatttactcaacggagttaaaaacacaaaaccctgatatataattagatgtacacatatatatgcacatcatagcagctttattcacaattgccaaaacttggaaacaaccaggatatttcatcagtagatgaatgaataaataaactgtgataaactatgctacatccagacaagggaatattatttagcattaaatgagctagcaaatgatgaaaagacatgaaggaaacttaaatgcatattactcagtgaaaggtcagtctacaaaggctacatgctttatgattccaactatatgactttctggaaaaggcaaaactacggagatgagtagttacctggggttggggggaaggagagatgaataggcagggcacagaggatgttttgggtagggaaaattttctgtgtaatagcataatgatggatgcatgccatcatacatttgtccaaacccagagaaggtaaacaccacgtgtgagccccaatggaaactatgtactttgaatgaaaatgatgtgtcaatgcagatttatctactgtagcaaatgaaccatttgggtgccggatgttgatattggaagagactgtgcatgggtggggagatatggtagaactctgtaccttcttctcaatttttctatgaacataaaacttctcttaaaaattaagtctactgggcgtagtggcacctgtctgtagtcccagctacttgggaggctgagacaggaagattgcttgagcccaggagttccaggctgtagtgagctatcattatgcctgtgcatagccactgcactccagcctgggcaacaatgtgagactccatctctaaaaaaaaaaataaataaaggttacccctggcacattgcctatggtgtagccgtgctccacaggagcaatcaaaaacaaaaataatgaaagtctttttaaaaatgactttctgatgtatttttacacaagcacaaagttttggcaaactcgtgttaatattccttcattacccattggttggcacggattatgctttgcctgtgtaaattacagcacggagttgatgcctctttaaggcaaggggctctgccctatgggtttagtgctagtcattggctgtaggtttcactgcgggatcctgtggctcctgggtgaggcagctcttactcagccaagggaagttctacgcagaagggggcagccatgagccatcagaaaccaacgggcacagaaactgggccattggggtacctgcttggtagagggactgtggttggggcaccacccagagtacagcagctactataatatataagatctattatttagctaaaaagaatagagaagttattttcaagaaaaaatttaatttgaaagttttgtgtgtagtatattggccatttaaattttgtttcactgcatttaagataaactctatattgtgttttcagttcctagagccatacagatacttgaaaccacaactgatttgatttgaagtgtgatatatacaaatacatatatacgtatatgtgaatatgtgtgtctagagacagaaaccaaattcttgaatataacaggtgttttctaatatttagcaccagcacaactgaggccacctctggttaaaggaatcaacagcacaacaatccatcttaagtggtttccacctgaagaactgaatggaccctctcctatatatcagctggaaaggagagagtcatctctaccagctctgatgaccacgatgatgaaaggaatccgtttcataggaaatgggtattgtaaatttcccagctccactcacccagtcaatacagacttcactggtaagtgtgtttgacattgctttatttaggagacacgaagctccaaaatgttttctatattttcatatccctttacaatgaatttttattatacctacttagagaaatactaattcagccctttgatagcttttgcctgattgtttcagcatgtccatctttttagaattctggggaaaaaagtcaggtaagtgaaggaaaggaaaaataaaagatgaagatgaagaagcagccttattggatcaaagtatgtgctttgtatttgtctttttgtgaagtatgtgccaggacatgtttcttgaaatattattcactgtgttctctgagcaaatgagtttgcaaaatgccctcatgctattggagattctcagtatgcaccccgttactgaaactccaaaaagcattgtaagaaagctattcaactttgcttagctaatcatgcctaacagatatttgatgtaatgttttctttttctttctcttgctgtttccttcttctttttttcactgtgacaacttaatatctcatgttctatgaagaacattgtggggaaaactaatcccagggaaaagataacttctctaagccaggactatggtaaagcaagtgaggctcttgtttcggtcacaaaatttaaaggcactaaaaaactcagtgttaatgtaaattttaatgcaatatttttaaaaatgaaaatcaatgtgaaagcactataaaaatattatcaaaagcttaaataaagacagattgaactctgtaccagcacaatcctgcctcactggccttaccctcctcctggccttactagtaccgcaatattttggaagtcccatgacctctgtgacttacagcttctaatagcatgatttcaatatagctgtaaaaaaactctacttatggtacaccatttttccaatttttaaaaaaatttacaaagtataagatatatattattatgtaaactcataaagatgttcatttaatcatccatgagaaagtcattttggagcaaatagctagtctttaaaatattgcatatgtgaagacaatgaaatggaattcgagctataaaaatttgtattgttttatttttacttaaaatagtaaatagtttgcttttcattgagactggctgctgatgcaccttggtaatgaatcatgattatattctaactgagatatattgagattaatgcatgattaactactctctcagtacatcaaaatcattgcagagtattagaaattgaaccattgagctaaaaatgctcaacttctgctttatattcttaaaatggcaaaaaagaaaagaaaaaaaaggtaaggaaaaggaatacatgaataatagtaaaactcttttctcaaatgaaaatggaaactacctccctgatccaatatttggcttgagatgtgtttcttccaagaaatagcatccgtttccattcagctgggcatagctgctgcaaggatgtcagcttggatttgcaggctagccagcagacagatttttgatgggatcacctactgttgttgcagtgaaagatagaatggcccgtccaccgttaataaatttggtcatcctcgctatctcccttgctggccttatactctgaggtgcaagggctaggggcagatgcagtgtctgggaagttttccaaattcctctttaaaaaagttaggctgtaaacactggcctcactaagcaggatccttctgtctataacaaagcctccagctgcacagaaaatatgcttggagtacacaccatttgaaggacaaggcagggagatcacaattttggcttgaactactccctggagctttggtgattcctggagaatgagaagttcttctgtgttcaggcatgttctgggacattgctgatgccctttttagtggtagcttggctttacttttaagacccctttaacttttaatataaccatgtatatactaagttattggtttgatcctttggctgacttgccaggtttggctgaatgattttattgagttgtaccgaagcctaactaaatgtacccaattaatgagctaggacaggttttcaaaaccaactcaataactttctgtaaacttgcatctttcctaaatagagaggtaagcatataattagcatcttacattattcttactgatatattatcctatttaatccctctgcaaccctataaagtagctctttttaccctcgtagtacaggaggaaaagaggctccagtgagtgacttgcccattgtgccacagctattgaatttcagggtggaaacgtgaattggagccttccaaatttaaaggcaaggtctctgctacagggtggaaaggaacttttgtagactgttctttggaagtgatagaataggaagtatacaaaagtaagaaagagggataggaggtgaaataattatcacccaaatattccttatctgacactgctaaactttttggatttgtctttcagttagtttcagctcacaaacagcaagtagtgttggcattatttattcatttatttgtatccccaaagacatgtaggcatcaggtttttttttaatagcaattaaacccagagtgttactagaagctagatgtttaaaatataaataacattatgtgaaatgggctgaagtgttatgcgttaaaacagtgctttcaactcacattcctttatatttcattcagtttttatattctgaggcaaatttaatgagcaaatccttgaaacctctaatatgatgaattacattttaaaagttaataactttaagataaactaagatgtcctttgttttgaattattcaattcaaaatctcaaacttcaactaaaatgacttctgaatagaaatatcaattagtactcaaatacaaatataaggttgatgtacataattatacatattttatatatgaaaagataagttagattgtacccatcaatgacaggaattataaacgcattcataacacatttcatggccatgaacattatgttgcaagtctcagtaagaaatatctcattattgtagtacaagaaagggatctcttacacaacttatgcctctttcatatttgctttaaatatttttatcttacacaatagaaagagaataattcaagcatatgaatatatgtcctaaaatgttgtttaatattgtaaattaccaagcttaatactgtaaataaaccctgtcaatatctacctttgggcagaataaagaaccagataaagctattttgggacctatttttgcttccttttcttttctgatacaagtgttcttttaaaaaatctaatcttcaggaagaatgtattatcagtcatttacatcatagtttaaatttaaaataattaactctctgtatattattatgaggacttcgaagaagattaactgataaattactttcaaatccaggccccattatttattagctaaatgtaattagacaactcatttaatcattttttgtgcttctgtttccttttctttaaaattaacataattccactgacagtattggtatctagcaggtaggtgaggatttaaagtagatagcccacctaatgaactttgcacagtgcctaccacacagattatttagtactcattaaacattagctattagttattattcatttaataaatatttattaagtgcctactatgagacaggagctttcctaagtgagagtattctgcagttataaaatcagcattctattaatttatttgctgttacacatgcaaaatatgtttgctcaaatgttatatctagggcatgagtaatatgcaatattccatattaaaatgtgatacttaattttgctattgaaaatagtaaaattaattgacttagtggtgaggacttgggcaaactacttttctgagtgtctaatcttgctcatctattaaattgaggattttgttgcatgatcaatgttctaacctctaaaattccaattctgtgaacatagaatgtttaggaggccccacaatccaaaatacaggctgtaatcatggcatctgtgagttaaaaaaacacctagagtttaaaataaattgttttctataatattttgtttattaatacaatttaagattgatacaaatttactgcttttctctaataatttaagaaatttagtgatatgggcagagttcaacataaaatagatattcaattattgggtcatatcagatgttataaaaaaagcagaaaattaaaatagtttcgtgatcttgtaattgggcaatgatataaacaatcatggtgaaacagtgccccagttacatggggttaaaaatactttcttcttccaacacagaaatagcaaatagagcctcccctcccatatgcaactagaaggggatatcattgtgcctttggagagaaaaaaaaatcatgctcgtttttttcaggaatgcagagtaaatctacttgatttatacaaagaatttagttctttccttgtaatgctagtaatccaagtggaacctggtaaaaacagcaagtaaaatactgctcagattggcattccaaaggtgaccctctttctccttgtcacttattttttcctattagcgaaaacaggtccatgatcatttgggggaaggtttgactattgtagtatccagatgccaatcacaccagccttttaaactgcctttactggtgaccctgcccagaaatcaggaactgcctttggggagatctttgtagcaaaccactggggagatgagcacacacatgcacctggatataattcccttttatttgtcttcacgagaaatgtgattactgatgttgaatatcttgcagatgagaactctatacagtttcttcataataatgatgttcaaggacactaaatgattgtcatacatttttgtatcatagtattcaccttcccaaaaatggttgaactaaaatgctttagaatacgaaatgcaattaattaccaagggatgaaaaaagaaatgcaaccaccaaaaatcaatatgtttaagagcatattctttatttcttttactccataatatttatgccttattgttattagtcttcttatttttagtgaattgggacatttaagcacttcattaaaagaaagctgattataagcatttatagtgaaggtgcaagtagggcaaacttcttcagatagactaattagtaaaagcatattaattctgaccttcaacacccttggtgtcccactatttgttttccttggagtgggagcaagtattttgacagaaagcgcttgaaaaaaataaaaaacaaaacaactaaacaaaaccccagttcttttcaagacagatttaaatcacaaattttacctaacctttgatgttagatttcagccctagttattgaaaaacaaatataataatctactatgtgtcctagaagtttaatgaacaggcagtaattatactaaaaaagtaaaggaaagagtaagaacatggtatgtggcagcaaagtaaaggagaaataattctcaggcagtgacaaaactctgctgtgttttctgattatgaaacaatcagaagagatgagaatggttgagttaatcagtttggactgaggacaaggatcaaaatgcatatcttcttagaataacagaagtcacactgactcatgataactagagatatggagatgtaaatgtcaagactgtttattttttattatatttagtagagaggtataagtaagttctcaggaaatgccttcaggtggcattgatggcactgcgagatgggagaggaccattatttccccattcatcaactacatcataagaccaatttaagaatgcatgtgttttaacccttgccttttaaaagtgacttattttgaagtacattcctgtaagtctcccttttttttgaaatattaatgttaggtaactggtaagctgagccaacactgaaaacaaactgtttttgttagctgttagcagtattttagttaacttaaagcatctgtttttgtccatcactgttaaaatttttcaaaatgcattgtcacctgatatataaaccacacgtgtgttcctatatactcatcccacatgcataaacatatgttttccagaaggtctctgggttttccgcaaccactcaatgggttctccttgcccactgcctagacagagccagtttatcaagacaggggaattgcaatagagaaagagtttaattcacatagagcctgctgtatgggaaacttgagttttattattactgaaatcagtctcttggagagtttggggatcagagtttttaagagtaatttggctggtaaggggttgggaagtgggagtgctgattggttgggtcggacatgaaatcctagggagtcaaagctgtcctcttgtggtgagtcagttcctgggtgaggaccacaagatcagatgagccagtttatcaatctgggtggtgatagctatttcatgagttaagggactgcaaaatatctcaaacactgatcttaaattttccaacagtgatgttatccccaggagcaatttggggaggttcggaatcttgcagctggaggctgcacggcttctaaaccatcattccttatcttgtagcaaatttgttagtcatacaaaggcagacaggtccccaggcaagaagggggtctatttagggaaaaggctgttaccatctttgtttcaaaactaaattgtaaactaaattttttcccaaggttaggtcaacctttgcccagcagtgaacaaggacatattagagtttataagtaagatagagttatttaggccaggtctctttcactgtcataattttcttagttataatttttgcaaagtcattttcatttctatatagtctcaaatatacctgctcaaattgtccagtgtcttttctgccagtatgttggcattttggaatcttttcaaagacttcattgcttaaaaaaaatgctgttgcttaatgatattttgtatcaatataacacattaattttaatttccccttcattcagcttaaatgggttggaaaaggaactttgagcagaaaaagaatcataattggtcagcaatggtagtgaaactagcacctttgaagatgattgatttttgatttagtaagatgaattattttgtgtatgttttcttgaaaaaaattagttaaaacatttaaaaatgtatagttatagttattttataccagttacagcactcttgaagtgtatagattaagttcctttctattcagatagagaggaatctgggaacatcattgtcaaaatgccatctctttcaaaacttggttccagtgctctaaagaaatgttttagaagattatgcactaatgttactggcggcaaattcatatagatctgtagccacctcaatttttgcattctcagaagaaagaatttgattgaggggacataaggcatattaagagaccaagacaaattttagagcaagagtgaaaatttatttaaaaattttagagcaggaatgaaaggaaataaagtatacttggaagagggccaagtgggtgacttgagagatgatttgacctttacttggggttttatataatggcatgcttccgaggtcttgcgtcccttctcccctgattcttcccttggggtgggctgtccacgtgtacagtagtctgccagcaattgggagaagttgaatgtccagtgtgtttactgaagttataggcatgctcacttaaggcatgtttccttgccagttaagtgttcccagaaggtcatataccggttaagcgccaacattttgcctcttagtgcgcatgcttgagcccactcacccatctcctgagatctcattgggaagctgctgatcacccgtctcaggtgtttctatctatagggagactgcctttccctggcactggctgtgactgattcttattattttagagagatagtgtaacaattatcacctgacggttgcctgacatttctggtggggcgttgtggggggcggtgcttctctgaccctgcccatagtctaactgccaactgtaacactaacagtttcattgaagtgggggaaatgttaagtaataatatgaaaaccatatttaaggtatatatatataaggaggctcacaaacatagccataggccgtttgtttggagctttgaaaagggaggctcagttccttgactgatgagcagtttccatttggaaattctttgactttagtgcaacttcaaaataaaggcatgagacagaaggagagaggaagaaaccctcaagccatctaaagtcatctctggcaatggtggccatatcattttcacaaaaaaggggcatccttggggaatatcataaaggaagaataaggacttaagggaaatgtgtgggaatgattgactgatcctccctccagcagaaaattaaaaatcaatgtagatgcatttttctcagcttcttcccttcatttttttcctctcctgaaacctgttcctccttccgtgtgtaccatctacagtgaatatcactattgccttaggcggaaaccttggaactctccttgaattggcacttgaactattcactcatttcctcccattctattaatgattcctcctctggccgttcttcctcggatacatctcttggaactacctgctggtcctacgctactgcctagtccagacctatgttgtgggcttctctgccaacagtttcaatcttctccaggctgttcttcaaacgaattatttttattggcattctcttgtgtaaaaccttttaatggtttcccagcgagagatgcccttcacaaacccttttctgcttacctgctttctacctatatacctcctcatctctcccaccaaggactggtatactctctagctctagaccattttttagtcccagtgcttgaatatagcacactctctcagatgcccatctctttgaacatattgatacctttgccgggtatgccctcatctatttgcaagtacttcgctttcctttcacctggctaattgctactcatcatgaaagggttagcttagctgttcccctaaataaacttccagcaaccccagcctcctcccatgccaaatctgggttgaggacctctcttatgtactactatagaaaccaacaattactctattttagctcttaccgcattctattaagacaggttgttcagggagctaagctatgaggacgcaaaggcataacgatgatacaatggactttggggactcaggggaaagtgtgggatggggtgagggataaaaaaaactacacattgggtacagtgtacactgttcaggtgatgtgtgtaccaaaatctcagaaatcaacactaaagaacgtattcatataaccaaatactgcctgttcccaaaaacacctgttgaaaaaaaaaaaaaactggttgtttgcttatctatgtttcatgtagactgaaattatgactatctttttcatgcttaacacatttgtgtcttgcacggcataagacatttaccagatactcaataaatatttattaactaaatgagtgatagaaaagagggaaatccaaaagatggatcacttagctgtaagaattatttaatggcaaaattcattatgcttttgaatatagttcacatttttaaatccacgtttttgaaagtattgatggtttagagtgataactcaatttgtttagtctctattggccttagatgtgtaagaaaatacattttaaactgtatagtaccagagacaaaaagaaatttcttgttaatggtcctcagttgctggcaaagttacttgtacaccagttgttatagctagagtgttatatcagaaattgttttctgccccaccatagctatcacattgtgttgctgaaaactaggtggttgcacatctcttagatacatgatctccttaggcttattaaattttgaggttaatgaatattttgacacttttacctatacatatcattagggcttattgcaataggtttaagatgacagtcataataaacatatacagtacaataaaaagcacttttaatcttgaaagtgctttaaaaacaacagtgatcaatgctatggatggattaacagcatcatgctgattgaattctatttcaaggacaatggaggtattgatgttggcagtctagttcagaaagtggcaatggctgtagtaaatggtgcaggttctggagtcagactccccaggtttcaaatctggctccccaacatgctggtgtgcgactttgcacaagtcattcccccagtgtgaaactcagtttcttcatctgttaaatggcttattgtaaggtttcaatgcaatcactgtaaaggattagtacacagtgtcttagtattgtgtatgcatttgtgaccagcattctgtaattctggacttcaattatgtgcctttccattgcatacatatattttatgtccctaagtcacataaatcttgttgatacttctttatgacctctctctactacacggtactctgatcattcactttattttactcattctgtgaacctctgacctgttttttgttgtcattgttacctttcttcttccactagaagcatacatgttctgcatctcatttctccacatctatttaaacagccaactttaaatgttatgtgtacttataaacctaactctattattccccctgtcttcataatcagtcttctcgaaaactaagactctctatgtgtcattttctcatggatcaattactcctcaatctactgtcatttggattcttttcttccacttctttattgtaaatactttcttctagattatcaatagttttcaagtcagagaactttccttaatcctcaccctatgtgccaataaataatattggtgccattttttccttttaaaaaataagaagaaactaaatatttctcactaggtttctccttctattttccctaaactgtgtttcaagctttgatattgctttctacatccacctttaaatggaagagttcaatcactcattcggttcgtatgcagtttttccttatttcactccactagctgatgttatgattgctgtcgtaaaaaggatactgagcaacacaagaatgattcctaaccttagggagcttaaagtcttgcagtgaaatcatgcatcaaacatgtaattaagtaattacaagtgacttctgtctccagctatgaagcatatcaaaaaatcctcctgctgagaaaagaaatagaagctggaaaaaatttctcaaaaatatggttaaagacataagtgagtaacaaaggcttctaggacttgtgggatcaagatcctagatataagaaaaaccatgtaggtgagccttttaaattatctttgtttttccttctgttttgtttgttaattcctctattgcatagtcttagggaaaaaaaaaagacaggcaaaaaattagagtctaggtggggtcctggtatacatgccaggttttcaattgaaatcctagaagagcaaatcattaataggctcttcttcctcagataaagcctcaattattcttaactactaattatactgagataaaagttatttttttaccaaaaatatttagatatttgctgaaagatcacatcaaccagagtcccagagtgtgcaattttttcctatacaatgtcgggcattcaatcaaatattaacaggcataccagaaaatagggccaaataaccaaaagataagataaataaaataaaaaatagaaacatatcctcaagtaattcagatatatggaaatatgtatttgcatacacacataggcatatacacacatatacatgtagatatatatgcatatatccagacacagactttaaaataactataattaatattatcaataaaatcaatgaaaatgttcagaatttaagtagcaaatgggaatatattagaataggaattttagagcggagtaacagctgaagttagcaactcagtagataaaataccaattccatccctgataaagtaaatagccttgttcttaatatcgtatgcaacaatgtaagttgggaacaaaatatatatgaaacacctatttgtagccaatatatagcaacagtgcagagctattatgcttaagtgaagaaaagcaaatgaactgagttgcacacacctggaattattgagctcaagcagagacattagtatatctggtaaaggaataaaaactggaattcagggctacaaaagtagatttggagggtaggttcccagagagaagattgatgctgaaaaataattcaaaaattctgtgtaacaattcttttttgggtgcttggccaacatttagaataatcctatgagaaacatagtagagaagatctgcttggtagttggagctaagtagagatttcacaggcaacatagagctaaggatgcacacatggagtttggacttaaccacagtagagaaaccttggtgaatactctgagctttcactcgactctccaaaagtccgtcctttatgagtaaattcccatgctttaggaataagggctattctttaggaacattgagataattgaaacagattcaccctagtgaagcctaaagccaaggctgagtaaggtcgaggtaatctggtaattttacttcccgtcaaaacagaattttgtattcattagtaaaaggtaaaataatccagaggttttactatgcgtcatccatgaagtgaccaataatgaaatgttaatagtcgatagaggcagacaaagacttcaaaataacttcagttaatgttaagagaaaataaaggacaaggtggacagaaaggatgataagataaaaaatatttcaatgcaaaattgaaatctgtacagtaattaataggaaaaaatggtatgtaaagtaaaatacctgaaatgaagagaatattgataagttttgccaatgaaacattgcagaaggcaagattagagaactcaacggtcaattgtaattgtccaaactgaagcatatcgagaaggaaatgaaaacatgaaaaaaagaacaatgaggtatttgaggacccagaaggaaagagtgaaagaatgagacaatagtaatattgtagaatagccaaatattatcaaatatgaaaaataagttcacacatagtttaacaaagtttagcaaaccataaggagggcaaatataaggaaagccatatccaggtatattacagtcaaattgcttaaaataaaagacaaagaaaaaccttcaaaagcacctggggagggtggggagacttattaccttcagtggagcaaaaataagaatgatgtctgagttttcaacaacaacaataaatgaatgccagaatataatggaatgatactttttaaatgctaaaattatttttttaacaataataacaacaaaagaaaactaccagtcaagatttctgtacccaggaaacatatccatcaaaaatgataaaataaaatatttttcttaacaaaagagttgaaaaaagttatcatcaaaagactggcattataaaaatcataaagtgtattaggacataggaaaagatcccaaaaggaagcacagagctgcaggaaagagtgcaaacctctagaaatggtaactaggtgtgtaaataaaaagtaatatttatgataaaaggcataaaaatcatactttgaagttgataacatgtaagaaaaaatgtatgacatcaattattttgtcacaaatgatgacggggtctatatggagctaaactgtggtaaaattcctaaaaagttatggaagttgaagaattaataatatgaagtaggccatagtagatcaaggattcagattatgatgccaaaggtaacaaccaaaagaatgatttagaaaattaatgtaaggaaacactaaatgttaaataaacacaggttaagctgataaaggagtttgagggtggcaagaagaagccagaaacaaagagcaaatgtggggaataaaaggacaaataccactgtggtgaacataaactcaactatatcagtagttgcattaaatctaaatagtctacccaaataagcataaaagttctcagattgatttaaaaaataaaaatatatgttgtttattcttataaacatactttaaatataaagacaaaattcgaaaacaaagaaagagataagatgtattgatatatagatagattttaagacaataaatgttagtagacaaaatggaggacatttcataatgacaaaaagatcaattcaatagagggacatataatcctaaatttaggtgctacttatagtttcagatatgtatataaaactgaagttgacagaaataaacagagaataaatatatcctcatagttgaagatataaatccccatctaatattttgacaggaaaagtacacaaaatattagtataactatcaaagatttgaaaatgaataaacaattacatctgtatataaaacatgtgacattttataagtgttgtcatatgtagaacatcacttccaacaactatataatatgcatttttgaggaacacataggacattttccaaatagttaatatcctgggctatagaaatcgcataatttttttttttaagagacgaggtcttactgtgttgctcaggctggtcttgaacccctgggctcaagcagtcttcccacttcagtctcccaaagtgttaggattacagatgtgatgagccactgcattcagcttgatctcataatatttcaagttctctgacaactgtgagattaaactagaactccaaatctaaaacataatccgattggaaaatatccctggctcaaaaagaaattatggaaattaaaaattatttttatctaatgataataatgccttaatacatataaaaacattgtaggatggacaatatcaggaatctgatattgctttatagctttaaatgcatatattagaaaaagggaatagttaacaatcaattagcttcccactcaagaagaaaccaggaaattaaagcagcatatgacacccaaaaaatatttgaataaaagaaattataaaaataagagaaatcaatgatatagcaaacagaaatgtaatggagaaaataagaccaagaattgattctagaaaatttggggaaaaatttctttgcaagtgatcaaggaaaggagaaagtacagattactactctcagggatgcaaagagccattactagaaatcttacagacattaaaaaaaataataatgtattaagaacagcactacgctaaaaccttgacaatacaggcaaaatacagagatcctttgcatgggagaaaaatctccaaatttaaactgacacaagaagatctagaaaatctatgtggtcctagatgtgttttaaaaatgaaatctatagttaagtcttttacataaagaaaaccccagggaaggtggcccgattggtggatttcatcaaacaattacagtagaaataatagcaatcctacaaaaaaactcttacagaaaatagaaaattgcaatggtttctatctcattttatgaggtcagaagaacttatacactaaaatctgacaaagaaattaacataaaggaaaacacaggtcaataataatcacaaaagtagattctaatattctctgtgtgtgtgtgtgtgtgtgtgtgtgtgtgtgtgtacataaataaaatgttatatcatgaccatgcaggttttattccagtagtgtgtaatcttttcaaaatgtatgtgattcaacacattaacatagtaaaaatgaaacattctaaattatcaccacagatttaacaaatgcatttaataaaatataataactattcataacaattctcagcaaactagtaatgaaagaacacatcctaataaattgtttttgtaaaagacctctaatagtaaaatatcaagtgctttttcccagaggtcaggtacaggacaaggaaattcactatcaccacttttatttaatgttgtactggaagtatagtactagccagagcaatatagcaataaaataaataagtattaggtatgtcaaagaagaagtaaaccatctttatttgtagatgtcattatttttattgatgtcaaaataatatataaactattcagtttactcagtaaacttagaaaagtgtcgaataaaggtcaatgtacagaaatcaaatgtttctattgaatagcaaaaaacaagtagaaaatgaaatgtttaaaagtaccatgcttactagaactaacacacataaatgacttagaaacaagtctgctaaaaggtaatgtaggacctccactctgaaaactacaaaaaattactgtgagaaattaaagaccaaataaatggaaagttacgccatgttcatggatctaaacacttaatattgttaaatagcaagtcttcctagtttgatctgtagaatccatatagtccctctcaaaatcccaggatttctgtaaaaatttacaagctaattttaatatgcacatgagagaggaaagtacttagagtagccaaggcaatactaaaaaagggcaaagtaggaaggcttatgtatcaagactaactataagactgcagtaggtaagcatgtatagtataggcaaaagaacagataagtatagtaataacatattgccacataaataccccaaataaatacatatatatgcagggcacagtggctcacacctgtaattccagcactttgagaggccaaggcaagagtattgcttgtgctcaggagttcaagactagcctgggtgacatagtgagacctcatctctacaaaaagctgaaaaattagctgggcatggtgaggcacctgtagtcccagttactcaggaggctgaggtaagagaatctcttgaacccaagagttcaaggctgcggtgagccttgattgcaccactgcactccagcctgggtgacagagcaagatcctgtctctaaaaaataataataatacatacatacatatgtgctctaaaaagcacatgcaaagttgttcatagcaactttatttctaataatcaaaaactggtaacaatccaaatttctatcaacagtagaatggataataaattataataaatttattcagtggactgcatatagaaataaaaatgagccaactattgcttcagagaacaatgtgggtgaatcttataacctgttagtgagtaaaagaagctagaatctaaagagtctagtattctatttatataaatttcttctttttcattttaacatttattttaggtataatgggtacaacatgcgggtttgttacttggctatattgcatgacgctaacgtttgggctatgggttccattacgcaagtagtgagcgtggtatccaataggtagtttttccaattacagtcccctccctcccttccagtgtctgttgttctcatgtttatgtccatgtgtgctcaatgtttagctctcacatataaatgaatatgtagtatttggttattgttccagcattaattcacttagaattatgaactccaactgcatccatgttgctgtaaaggaaatgattttgttcttttttgtgattgggtagtattccatggtgtatatgtaccacattttctttatccagtccatcattgatgggcacctagattgattctgtgtctttgctattgtgattagtgtagcaatgaacatatgagtgcatgcgtctttttggtagaatgatttatttttctttgggtataacaggattgctgtgtcaaatggtagctctgttttaagttctttgagaaatctccagactgctttccacagtggctgaactaatttacatttccaccaatcgtgcataagcattctctcttttccacagccttaccagcatctgctgttttttgactttttaataataaacattctgactagtgtgagatggtatctcattgttgttttgatttccatttctctgacaattattgatgctgcacattttttcatgtttgttggttgcttgtatgtcatcttctgtgaagtgtatgtttggctgggcgcggtggctcacacctgtaatccagcactttgggaggccgaggtgggtggatcacgaggtcaagagatcgagaccatcctggtcaacatggtgaaaccctgtctctactaaaaatacaaaaattagctgggcatggtggtgtgtgcctgtaatcccagctactcaggaggctgaggcaggagaatcacttgaacccaggaggcaggggttgcagtgagccaagatggcaccactgcactccagcctggcaacagagcaaaactccgtctcaaaaaaaaaaaaaagagatagaagtatgtgttcatgttctttcccattttttaaatggagttgtttttcttttgttgatttgtttaagttccttataggttctgcatattagaactttgtcagatgcataatttgtatattctgtaggctgtctgtttactctgtggatagtttcttttggtgtgtgtgcagagacactttagtttaattaggtctcagttgtccatttctaaagctgcaaagtgaaatcagtggtgacagaaatcagtagatggggtaataactgaaaggaagcaaaaagaagccctctgagattctggaattattttataaattagtctgagaggagtttataagtgtagatttattttgtaaatgtccatcaaaatataccttgataattagtgcactttatttttgttatactttactttgaaaagttactgaataaatgtttcaagcctgcaaagtccaaaaataagatgtgaaaaaatactgtaacataacagaagcactcaacccagtctagaggattagtgaagacctctccgaggatgaggcaagttgagttagctaggccaaaaaaaaaaaaaaaaagaaaaaaaaaagaaagaaagaaagaaaaagaaagaaggaaagtaaaggagtccaggtagagaaagtatcatgtatcaatgtcttaatgtgggagatgacatgtacataaataaacaaattagtaagcaagaaaaacttggaaattctaatataaattagattcttgccagaagggtgcatggtgaggctgaaataaaaaaggggccagatcatgcaagggccatcacattgaaaattttgaacgtaattttattcatctttataagaccactgtggaggttacagcctgataccaagaatgtttttaagaagggcatgctgatattttcactgatattgtacatgtaccattcatagattgactcactaaaagttgcaattttatttaatcatctaataagattatttatagaatgtctgcaaaatgttagaagatcttccttataagaattagcatagctgaatggtttaaaaaaaaatgaaattctgaatcccagcatggatctattgcattcttgcaattgtccaaggcaaaaggttctgcttgcctgcttcataaacaaaatcaattaaccgagactgcagcattgcagtaaaaagtttaatttaagccaagccagccaagtggaagaactggagttatcactcaaatcagtctctctgaagtcttgaaggttaggatttttatggataatttagtgggcagaggggctagggaatgggtgctgctgataagttgaagatgaaatcataagagcatggaaaatggtcctcctgtattaagtctgtctctgggtggggcaacaggatgggttgagtcatgagtcattagtccaggtgggatcagtttgaaaaacatctcaaaaaagcaatcttgggttttacaatagtgatgttatctataggagcaattggggaagtcaccaatcttgtgacctctgaccacattattcctgaacagtaagcaattataaaaattacacctacattttagcagcattcaggcccctcccgtaatcctattcttgtggcctttcattagtcttatgaaggtggtttttagtctctgagaagggaggaggttagttttagggagggatgatcatctatgatcatctttgctttcaagttaaactatgaactaaatttctcccagtgtccaggaatggccaaagacagcttgaaggttagaagcaagatggagtcaactatgtcagatttctcttactgtcgtaattttgtaaaatcagtttcatcctaatctctggagaagtacctagaaatttgcatttggataagatatacagatctacactattaaagacagagctatcttacccacccccaccccagctatttgtctaagggaaatgaaacaatttgtacatacaaaaggctggcacacacatacgcattgcgcctacattcacaagagccagaaactggaaacaactcaaatatccatcagtaggtgaattgattaataaaatgtggtatatgtatgtgatgaaatactagtaagcaatacaaaggaaagagcagaagaacacttaatcgtaattccacttatataaaattcttaataataattaatgtatagtgacaaaaaggagatcagcagttgcctaggcctgaggaggagggggtgatggaaatgctgtgtaacaatcaaggtagtggttttacaagtgtgtacatctgtcaaaacatatcgaactgaaccatttaaacagatgtgcttcagtatatatgtaaatttttatctcactaaaattaataaaatattctccaagtgattcttgcaacattcaagtatgggaaccattgatttacactgtaatgaacaagttgctttaactttgtttggaaaccaaacaattttaatattattttaccatttaaattctgagctctttcagatagaaacttaagcagtgtgtatactgcttatcactccaaatttcacctgaaacaaattggtatatactgtttgtcataaaaataagaaaatgactttcattaaattatgctgacaatgagaatcttgtacaatttcaatgaaataactttttttaatgaaatagggtttcttttgatctcattcacattcagaagggaatttttgtaaatagaaaggactatattttattttatcctaagaaggaatttagtcagtaaaaatatgaaatagacacttgagtatacagttgaccagttattgccttgaagctactgcacctctgtaatgtatttttcatagcttatataatccgtgttaatatgctacattattaagttcaactgtgagaaatatagttgcttgaaaacagatttcttctgcatacttataaattcagtagttggaaaaaaattaaagaaatataattaaagattgcaaaatcaatttgaccctcacttaaaatgtgttgagtggaggcagcaagcagcagcctacatctgatgctgttctctccttgtttacttcacaaaactgtgcaaattagaactttaatttacagagctgttaaagcctcattaaaaactttcagcaagtatcctattttgagggtttttttccccttatatctaatatgcagcattatctctgttttgtgggcatgtatgaggcaatatctataggcatattaatgtaaactgcatatatgaaatgaaagtttttcacatggaaaggacactagtggtgtctgtcaattgcttcccaaagtgattaatttctccatttacttggtgtttattggcatctactaacactggatctctgttggatcataggaatataattgggctccagtgaaatgggagaattccctgacaccctgttgcaggatatgtgacagaggtgtggcttgtctgcttgaccgccttgcactcaaactccttgcaggagagggagcatgcagatgggcaggtgtgggagccagggcaagaacttttgggctccagtcccatggtagtatctaggggtgggtgcttgtgactcccaaagccccagtgggtgtgttacaatgcccttttagctgtgccatccacatatggcttaagtgttaaccagctcagtgctttcttggtacctgggttcttgtccggtgtccaagaagaatcaggttacatggataaactgaaggatggtaaatgtgggggattttattgctggatggaggtggctctcagtggaatggatgggaaactggaaaggggatggagtgggaagatgatcttcccctggagtttgggcatccggcggccaatctcctctctgactaaccccagccgaaatcctctcaatgttcagatgctccttttcttctcttcttctatgtggcactgctctgctattctcctgttcctctgctcttctgctcatggagcctggggtttggggtttatatgggtataggatagtggggcatggtgggccaaaaggcaacacttgggtgtgaaaacagaagtgcctttttttatttagggctgtgggtttccaggcttcagggtggggcctttgccagggaactgccctcttctacccagcatttccctgcctcctgtctttatcaccagtagacttgttccctgctcttacaggatttcatgcgtgtccgtgtgaagagaccaccaaacaggctttgtgtgagcaataaagctgtttatttcacctgggtgcaggcgggctgagtctgaaaagagagtcagtgaagggagataagggtggggccgttttataggatttgggtaggtaaaggaaaattacagtcaaagggggtttgttctctggcgggtgggagtgggggtcgcaaggtgctcagtgggcaggagtgggggtcgcaaggtgctcagtgggggtgatttttgagccaggatgagccaggaaaaggactttcacaaggtaatgtcataagttaaggcaaggaccggccatttacatttcttttgtggtggaatgtcatcagttaaggtggggcaggacatattcacttcttttgtgattctttagttacttcaggccatctgggcgtatacgtgcaggtcacaggggatgcgatggcttggcttgggctcagaggcctgacattcctgccttcttaataagaaaaataaaacaaaatagtattgaagtgttggggcggcgaaaatttttggggggtggtatggagagagaatggacgatgtttctcagggctgcttcaagtgcgattaggggcggcgtgggaacctagagtgggagagattaagctgaagggaggtcttgtggtaaggtgtgatattgtggggatgttagaagaaacatttgtcgtatagaatgattggtgatggcctggatatggttttggatgaattgagaaactaaatggaagatacaaggtccgaataaaagaaggaaaaaaatgggtattaaaggactaagaattgggaggacccaggacatccaattagagagtgcccaagggggttcagcgtaattacttgcttggttggcaagtttttgggctctatccttgagtttttttatgttgtcatacaccaggccagattgatttaggtaaaaacaacactcctcatttaagaatatgcagagtcctcctttttcagcattgagtaagtcaaggcctcggcggttttggaggacaactgcagctaaagagtcaacttgggcctggaggactgataaagtttgtgatatgtgtgtgatgctagcagagaagtcattagacaggctacagaaggtcatgacagacgttgaaatgcctgctattccagtaccgagagcaatcatggaggcagaaagtcctaaaccgaccatcaagggaattagtggaataactcttttttgtcatgtcggtgtcatgaggggaacagggagctcttcggtcccatttgcaaattgaattttgggggtaaggaagactagtgtacatgtggctgtccaattggcaggtagacacatgtaggtagaggatccacagaggaagaagagaccttgtgcgaggcaaaactggagatgtaaagtaaaaaggtgagaaggagtgctgaaaggggtgtcttgtacccagactcctagggatccacctagggcggcagctgtcagaggttgtaatggggactgatggggtaactgcgtagagggggaggttcgattttcatggtgtatgagaaaacgttgagtatctacgagcaacctttcactgttattttcggggctgggtataagtaaacaagaagagggcctgggaggagagtctgatgagcaaggggaaggtagccaaggatggagtgaaatacagggcacgtgtcttcctaagcaataattactgctaatgtttttaagtttgtcagtattgatagagggcttgtctgtaatatggagctggaaggctccaattgtttcagtgatgtgtgtagttggacttcggagatgaagagtaaaggaacatcgagaaggtgaaaggttacccaggggaattccagtgggtctttgccgagagatacataaaggagcagccacaggaatagtagtttgtgttgtgagaggtccaaatatggggggagtagagttaatataaggagaaaggttttttaaataagtgcgaaggagggcggcagcttgctgatgtgaaatgtctggggaagtcttgctgaacctgtctagaaagtaaatgagttcttcaggagggtaaaggtgagggctgttaaaggaagttcggaggtgtagggagacgggagatgttgcccagtctgtctgtaagacggggacagctgtgtaggcactggaagaaagggaaatgcaaagccagcagttgttcgctaaggagggattagaagcagctaggagagaatgggttaaggttgacagtgtggtggagatagctggggagaggtagagggtgacataagaatgggaatgagaataagagtgagtataaaagtaaagaatagaacttcatcagggtggaagtattggagggtgccttgccagcaaagatcatctatccactttaagagggagttaagagtggcagtttggggatagcaccaagagatatcagctgtgatggcttgaagaaacagtgtaaaccagcagtgtaaacaagagtagggcatttataagtagttgagaatggagaataggagtatgaccggacagaagatagtagggatgactagttttttggggctcggcctaagtggtggggtgacttcgtaaagccctgttgcaaaaagtagggtaaggacgaacagacctaatagaatgaagggatgtattaggctcataagggttattactgttcttcagaaatacgagtgagtttaagggaagtgggggagagtacttgcgacttccaggaggaagaggagggattaggctggctgtccgatggacacagctttattctggaatggtgaacccagtggggaggatcctgcaggcggacggcagtcggggtactatagatgactaagtagggtccggtccattgaggttatagagtttgaggggtcagattcttaacaagaactgatcgtccagctaggttgtcttcatatggctggggatctggagtaggcaagagaagattagcagcctggcgaatttcctgtctagcctgctagagcactggaagatagtagcctagagggctggtgtctgggatgaggttggggccaagcaagaaagtgcgtccatataaaagttcaaatggactgtaccctgtagcatctcggggacaggctctgactctgagaagagcaagaggtaaaagtactgtccaatcctttttaagttggaggctgagcttggtgaggtgtgccttttaaaagaccattagtccgttctacctttcctgaagattgaggacggtaaggggtatgaaggttccactgaataccaagagcctgagaaactgctttggtgatttggctagtaaaggctggtccgttatcagactgtatagaggtgggaaggccaaaccggggaattatgtctgacagaagggaagaaatgaccgtggtggccttctcagacccggtaggaaaggcctctacttattttgagggcctctaacagtattaaagcagcggcagccgctgcacacagacatgagggctaggttaaaacagtaaggtcaagttgtttggacagaaaggctacagggtgtggtcttggctcttgtgtaaaaattctgaccgtgctaaccatgcctaggaaggaaaggagttgttctgtagaaggtgcttgggtttgagagattagtcggacaggattggcagggagagcacgtgtgtttttatgagaattatgccgaaataggtaacagatgaggaagaaatttgggcttgattgaagtaatgggggctgtctgtgaagctttgcagcagtacagcctaggtaatttgctgagcttgatgggtgtcagggtcagtccaagtgaaagtgaagagaggctgggattaagggtgcaaaggaatagtaaagaaggcatgtttgagatctagaacacgataatgggttgtagaggcaggtattgaggataggagagtatatgggtttggcaccacagggtgtataggcaaaacaatttggttgataaggtgcagatcctgaactaacttgtaaggcttgtctggttttaggacaggtaaaatgggggaattgtaaggagagtttataggctttaaaaggccatgctgtagcaggcgggtgataacaggctttaatcctttcaaagcatgctgtgaggtgggatattggcattgagtggggtaagggtgattaggttttaatgagatggtaaggggtgcatgatcggtcaccaaggagggagtagaggtatcttatacttgtgagttaaggtggggggatagaagaggaggatgcaaaggaggctttggattgggaagaagggcggcaatgagatatagctgtagtccaggaatagtcagggaagcagataatttagttaaagtgtctcagcctaataagggaactgggcaggtggggataactaaaaaggagtgcttaaaagagtattgtctaagttggcaccagagttggggagttttaagaggtttagaagcctggccatcaatacccacaacagttatggaggcaagggaaacaggcccttgaaaagagggtaatgtggagtgggtagcctccgtattgattaagaaggggacgggcttaccttccattgtgagagttacccgaagctcggcgtccgtgatggtctagggggcttccgaggcgatcgggcagtgtcagtcttcagcccctaagccgagaagatctgggaaggagtcagagagccttgggccagagttccaggggctctgggagtggctgccaggtgagttgaacagtccgattttcagtggggtcccacacagatgggacgcggcttaggaggaatcccgggctgcgggcattccttggcccagtggccagatttccagcacgtgtagcaagctcctgggggaggaggttctggaggaatgcctggccgctgcggttcaggcgtttggaagttcttgtgtgctggagatgtggctggggtttgtctcacagtggaggcaaggaattgcaacttttttctattatggtacaccttgaaggcgaggttaattaaatcctgttgtggggtttgcgggctggaatttaatttttggagttttatttaatgtcgggagcagattgggtaataaaatgtattttgagaataagacggccttttgaccttttagggtctagggctgtaaagtgtctcagtgttgctgccaaacaagtcatgaactgggctggatttttatatttgatgaaaaacagcctaaacgctatctgatttgggataaagaaaaaggagcattaaccttgactatgcctttagctccagccacctttttaagagtaaattgctgggcaggtgggggagggctagtcacggaacgaaactgtaagccggaccaggtgtgaggaggggaggtgataaaaagattatagggtggaggagcagaggctgaggaagaattgggacctagctcggcctggcgaggaacaacctggggaggaagggagaggtcagatgggtctgtagaaaaggaagattagaaagactcagcgatgcttggggttggtactgaggggacaggcaggagggaaagaaggaagatttgggatgagtttaactggtcacagagactaggaagggactgatgtgtaaaagaatgcctggatgtcaggcacctcaggccatttgcctattttatgacaagaattatttagattttgcaggttggaaaaattcaaagtgccattttctggctatttggaactactgtcgagtttgtattggggtcaagtggcattgcagaagaaaataaggcatttaggttttaggtcaggtgtgagttgaagaggttttaagttcttaaggacacaggctaaaggagaagaaggaggaatggagggtggaaggttgcccatagtgaaggaggcaaaccctgagaaaagagagcatagagacacggaggaggggagtggggttcttgccctccagaaaagcagagagggggttgggacacggaaataagggattggggcacagagataagaggtcagggtgcggaaataagggattggggcacagagataagaggttggggtgcggaaataagcgattgggggtttcttgccccctaggaaagcgggacttgccgctaagggtgaaggagaaggggttgaggggtacttgcccctgccccaggaaagcgggacttggcgctaagggtgaaggaccaaggcaggtgtccctgcgtggtctgacacccttgaaacgtgagtgtataatcagagaggtgtccctgcaatgattaaacaccaagggaaggctgccttcccagtctgtgaccagcgccggagttttgagttcacggataaaacatgtctcttttgtctctaccagaaaatgaaaggaattgaaattaagagaagggagagattgaagtgtggcaccaagattgaaaggagaaagcggttgagggatagtgagggaggttggagaagagagtaaaaaaggccgcttaccggatttgaaattggtgagatgtttcttgggctggtcggtctgaggacctgaggtcgtaggtggatctttctcacagagcaaagagcaggaggacaggggattgatctcccaagggaggtcccccgatccgagtcacagcaccaaatttcatgcgcgtccgtgtgaagagaccaccaaacaggctttgtgtgagcaataaagctgtttatttcacctgggtgcaggtgggctgagtccgaaaagagagtcagcgaagggagataagggtggggccgttttataggatttgggtaggtaaaggaaaattacagtcaaagggggtttgttctctggcaggtaggagtgggggttgcaaggtgctcagtgggggtgctttttgagccaggatgagccaggagaaggactttcacgaggtaatgtcatcagttaaggcaaggactggccatttacacttcttttgtggtggaatgtcatcagttaaggtggggcaggacatattcacttcttttgtgattctttagttacttcaggccatctgggcgtatacgtgcaggtcacaggggatgcgatggcttggcttgggctcagaggcctgacacaggacttgtgggaatataatccatggctgtttgactactctgaactgttatactgctgtttttctgcccagggggatgttaaagccaaaagcaagtaatcaacaagattttttttaatcttaaaatactgaattaagccttaacctttaaaacaatttttgttgtagacatagatttgctatttgtttcagacatcctttaggcttttgatctagcacatgactaccccttcttaccgcattgcccctggatcccccaaggagagacacatggctacctcctttgtaccttggcccttgctgtactgatcacagctagttaggacagctatgaaagcctgctccatgcagaactgattctgttcgcatgagaatttggaattggaatttagagctaaccagttggtctgtgtttgtcctgaacataacataaaaattaattgaaatgagagacagagagaggtgtattgttgtgggggcgggtgagaaagtagggtgagggaagggaaggagggaatgctgaagtatagagcagagagcagcagagaggtgagaaacaggaaaacattcctcaaagcttctccactcccagtccaggaatcttgcctagccttgagttacagaacacactgttatctctggataatacatttcctattttgctcaaagtcctggtgtgaatatgcaaccagagatttttaacgtaaaaagaagctatgagcatatgaatggaagttgaagacctgagaatggactaagggactcagggttagggacagaccctaggaggaaagatggcattcagagatagatagttaaaaaacaatcaagaaaaagtagccagataagtaggtgaagaactgcttgacaatcaaggaaagattggtgaattaggtaatattcatttgcataaaatgttgcccagtggtcaggtaggcgaaaagctgaatataggcagttagattttaccatttttatgtttctatcccctgctacctgactaaactattttcaaaatgtattttatagcttagagccttcccaaaattcctagtattatatataaatttccaatacatattgatagctgaacaatcatattttcctggggtttattttaataatatatgcatttattttagccaatgatattcacaaagctttgctgaaatgtgttttgtttaacttggttctgtatatttttccatgaaaagccatactaaaaggacattttccaagtattaaaaaaaaaagcaaaaaaccctgcagtccagaatgcataatttgttctgggatagttaaaattctaagagaagtcttctttgttctttccttgctctttctttgttctccaaaagggtcgtatttaaactatgggtcatttctcatctgaatagccagggaagattagctacattgctactgatgcacttgatattttctcattacataacatgtggccacagattctagccagtctgataagataaaatgttcataatacttagaagataaaagggaatcatcactacttaagatccctttaaatccaatctgttgatctgtatgagattacatttttggctctcatttactagttccccctaaagaaagtcttgatatagctactgggttcctggcttgtattttgatagtcaaaacggcagtctggatatttttctactcagtagatacaatagaagaccaaagcttcttgcattgtagtcactgaccttgccatgtcatttcatattttctgtagatttggtcctggaaaatcaaatattaagcaagtttgacagttcagctaaattccataaggtcatctatcacattacatacagtaattgattttacgttaattggtctttagtttcatggttcatgtttctggttttctggtagtttccagaaactttcgtgttaaatgaagagctatgctatgtaaataaaattcagtaaaacttccctttcattttaattatgtgcttttgaaaactaattttattgggttctttaaaaaactccgtaggagtcaggcatgaattttctactctttagggcatttcaatcatgaaagaaagaaccatctatatttttcatcatctcaaaacaattttagaccactactatttgtaggtacaaataatgttcattgatttgctttatatttattaatcacctaatagttatgaaatggtgccctaagtactgtgactaaaaaataaatattagtaagttaattttactaatttttatccttaggagctttaatttatgctagataatatctgagaaaaagtcaatagtatgatgctgtttaaagaaagaaagcaactgctatcctgtgttgttgtattagcagaattgtcaaggataaaataaataaggtgaagattagactccacttggcaatctttagcccttgattggagtaccatgttccatttgggaaggcacacttattacaacatagacaagtttggcagaggtttcaaaagaaagcaacaaaaaaatgatgaagggccttgaaaatggggcctgtaagaaaaggctgagagacgtgagaatgttcaatcttgaggaaaaaaggcagaggggacacatgataactgtttacagatgcgtaaagaggtgttatggagagaagagggacctatttttctcattagtcaacaaagacacttcaagaagtaatgggtttaaaacacgtggggggaaattcaggttaattattagattaagttaggtaaaatttaaatatttaaaatgttatgattccaagcataattaggctgtggagactaaatcacattagaattggcataggaaagtgagatgaaaacaaattcaatctgaatgcagagggttaattattgcaagtttatatttgcattaaatgttatcatatttcaaaatactttcacatatattgttttactgatctctggacattcttaggaaagagagagtgtatcagctagttttacagctgagaaaatggaatttcagagaggcaaaatgttgcttcgaacccccacactccagattagatagacaaaactgctaagtgcataggattagacaagcaggactaaaagccaactcttcacattttctgtcaatatgtttcacatggtaccttgctatcttttcatttgtaatatgatttctattgtggagaaatattgtttacatagaggaacaagaaacatgattgaacttatatctgcattacctatatctattatttatctctcactactcacaattgtgaaataaactcagcactttggtattatattttgacaaatcattgccaaacgtaatacaatctccagttggtatgatgtggtgagaccctaccttctaccattacctagaggtggagacacatttcatcttttatgaatttcatattcctcatctgtaggaagaaaattataatatcttctggtttcttctagttttacaataaggagtgaatgagaaaatacctgtagaagtacctgaacttgttcaaagaaataaacttgttcaaagcataaactttgcttggggggaaatgtgtgttgtttttggtgtactgtggattttgataatccctttccagttttattttcaatcctaccttttttttttttttcatttcctaatttcagattcctgaggtcaaggccaatgtctttgttgaagcacttaaaatttgctagtctaatgtaggtgttcagtaatagttggtgggtgactgagttaacaaatggatgaataaatactttcagttggatattatgtctgggatatgagcaagaggtgataaatgccatatataatcatcttgttatactcctttatgtaatgatgtatgtttaaagtattttatagaaacatggtatgccagattctcagttagatcctgagaatacaagccactcaaagtctaaaggggttttgcagaccactccaatgctaggtatagacaaaactcttcccagcaaagcaaggtagctgatgccaaaatgttaccaaggaaagacccattggttggttgccaagacccttatggagtctgagaagatgttttagactccctcaaccatgcacacaaattgtgtaaagtaatccaggaggcagcctaaatggaaaggctgttagtatgctgagcttgctaggaaatggaggaattttacggaaaatgtcagcctctgtagactcctgtgatgctcgctagggtgccagccttccccagggagcccacagcacctggcaggcagactgcagcagggagtctcactgggaggatacaaaagagcttaatggccccctgtgcataatgttgaaagaggctgcaatttttgttttcttcggagattaacgtgtgtgtattgcaggttcaaaatggtaagaatcttaattagagttgcaggaagttgcataatatactccatgtcttactttttccgcacaccaaataacagaatctatttgccaaattatgaaggttgatggagaatgaaaactgtaatttgagtaaatgggagccctgcccccattttttccagttagtcacaaagtttaaaatgcaaagaagtaaatctcccaagggagcaattctatttcatctgtggaagaaagacatatgttgttactgatgaaacctctgttgtgaaagcagagccaatgctgggaaaaacttgaaggaaaaactagctgagagccctctgtctcaggagcctgtggcctttgggtccacccagggctgcctgtgcctcttcctgaggcttttcttgaaggcctgctctttcctctgattaccttagggcaattgcctgcctctcttaagagaaaatgtacctgttttgtgccacatcccttcaggcccctgagctggacagtagattgatctgacagatgtcactttgatattaaatcaatagtaccaatatgtttctgggttttcctggccttagcaaggttttatgttcacttacttagagacattctggagaatatctcagaactcaaaacatgagatcaaattggagttctatgggagagaggatattgaattacttggctttattatggctgcactcatagggccagccacgtgtaaaagtttcattctctttttttgaacaaatatttattgaaaacaataaattaccaagaactgtgttaaaatatacagatgtctaagcagacacggcacaatctatggccctaagaagtctaggaggtacaatattttatataaattattcatcttcattcaaagttatttattgagcatctactatgtgccgtgcactgtgcatgcccctggaaagcataagagacaaaattcctttctttgtgggagctgtattctagtgaggttcagcaggtgaacagcaatccgtgttaattatttcttcttccactgaaatgaaaattctatgtttctaaaaaatattataaaagtactcttcaaacctcatattaagaaagtcaaattgtctttagccacatttgataaggattaaagataatcttactattttattttaaacatatttagagcagtccttgtctgaaggaagcttgtgttgaattttttataaagtgagttaattaccttctaattaattttgtgtgtgtgtagtgctcacctaacacaagattttcatgctgaatttgctcccccaaaagaaaaacaattcctatatatgttgtaaagggtcgcaagtcagaactgagatggaggcaatacaaatatataaccagcggcctcagacaagttcccaaaattgggaagaatgaagagatagggaatgactgcagagcctttttcaggaaagcatgagattggaagatgaatgctcaagtaaattagaactcaggaaaagtactgaacagcaggatcatatcatcaaaaatctggctgataggttttgaactcactgaactgaatctatttagaagtacattttgggaagactaaataaacatcaacactatggtctattctaattcaggctcttgctttgtctattttccaggtgataaaacactgattgttattagtgttatcatcaagcatattgagcagtcaatctgtaagttaatagcaatacacagccatatagtcctggaactagaaggaaagaaaatgaattttttcttttttttttttctttttttttctgtagaggggaagaaaaattcaacaccttgagtcagctgcgactcaagggtccattataacttcgagatttttaacagcctgtgcctagggtatgggagatgaattttgttccaaagtggtgacatgggcagatataaacccctgggagcaatttcaggcaagttgagagtccattctaaacaaaaatggacagaatgtggaagatggaattcccacacttgctttctgaccttggctgatattcctcagcagttggtaattagaggaaatactgaagctgagaggatgaaagaataaagaagagtagaataatcagaattgaaagaatgtaaataagtaataagatggggcaaaaacaggaatggtgtcactgacaaaggtggccacactttgcagtaagatgtgagtgggacatagaaactagatttggttgagtaagaggaaaaccatatatacacacacatatatatacacacacacacacacacacacacattaatatatgcatatttaaaaatatatacatttcaaaagctcatttatgttgaatactaagtgggaaattcatcagctgtttggcttcctgtctgttttattctttgccattgcagacttgagttgtcttcctgaaatctttctgggagataactgcatgcccagcccttttctttcatcagaaaaagggtattctgccctgagtcagaagcagggggaaaatagatgataatatctacatgttattgctagaacagagtcaaataaaaattaaaagtccatcaagtgatcaggttgaagtcaataaaaaggtcaataaaaagcaaggatgagccaaaaaagaggacttggtgtactggaaaatgccaggaaaaataaaagacagaaaaaacactgtggcaagatcttctcctgtggcctcagggaagtgcatgataaaattaattgaagcttatcacccatgaaaaagggctacagttggagcaatagctgcacggactacataacagtacaggttctttagcctaagacaaagataacagatttttgttttacttttgcaagcttttttaatatactgagttaaaactctctttttttgcctttattcaactgaatgctgcattttttgagcaatactaagtgttgattggcttacttgaacagcaatttgttaagaggcctgctgtgtaccggccattatcctaaataccagtgtacaaagattagtgatgtgtctatctgctttcaaaactcttataatctgtagcaacatgagattaatttttacatatggtttatatataacaatctaattccaatacaatcatatcattctccatatctcataagaaattgttttgggacattatttaaagaaaactttatacaataaatctataaattgttagtagatttgactcctcctttagatgaaagttttcatcttgtcgtttttttaaattcaaaatatgttattttaagttgatataaaacaatcatattagcaaaatgcatccacattgaaaacttagctggatgggtaaagatcgctctattaaactgtgatgtttaatactgagtgtcaacttgattggatttaaggatacaaagtactgatcctgggtgtgtctgtgagggtgttgccaaaggagattaatatttgagtcagtgggctgagaaagccagaccgacccttaatctgggtgggcacaatcaaatcagctgccggtttggctagaatataagcaggcagaaaaaggtgaaaagagagactggcctagcctcccagcctgcatctttctcctgggctggatgctttctgcccttgaatattggactccaagttcttcagttttgggacttggactggctctccttgctcctcggtctgcaggcggcctgttgggaaccctgtgatcatgagttaataaactcttttacatgatattctcatgatagtgaataaatttcatgagatctgatgggtttatcacgggtttctgcttttgcttcctcctcatttttcacttgctgccaccacgtaagaagtgcctttcacctcccaccatgattctgaggcctccccagccatgtagtactgtaagtccaattaaatctctttttattcccagttttgggtatgtctttatcagcagcgtgaaaacaaactaatacaggcactgttccatctccaaatggtcataatttatcagttcaaaggaacgtactttgcatgccaccaaagggttttctaagaattgggtcagcaattttaagtcaaggttgttggttctgagttgtacctttgagtcagtctttcagcattttagttctcaaatctagttttctactctttccaatggggttattcatccaatagacatgggaaaatcatcctaatcaaaacaaatttatgatcatttctctctggcatgactgcatcaggtagcttaaaccatagaagtttattgtctcacaattctgaaggctagaagttcgagaaaaagatatcagcaggattgatatcttctgaggggctgtgaggaagaatctgttccatggttcacccagcttctggtggtttgctggcaatctttgatgttccttttgcagtgtcaccccattctctgccttcgttgtcacatggcattttctttgcatgcacatctgtctcttcatatggtgtttcttttataaagacaccagtcatactacagtagggcctcaccctaccccattgtgacttcattttaatttattacatctgcaaaatccctatttccaaataaggtcatattctgaggtatgagtgggttggactacagcatatgaattttggggagacataattcaatccattataatcatactgcataactgacgagaaagtaaagaatcaatctgatgcaggaaagataacctaatcaaaaagaggaattaaacaactccaactaattccttacatttaatctatttaatataaaattataattttgcaaacacagcatggtgcactatggtaactaaagcaattggatgatatttcaaaagctttaataactagtatttaatcacagatgctgtgtgtttttacctgaaattcatcctggtaatgcaacataattaattgcacaatttattttagcatgagttttcttatatttatagagatagcatagcaatcttgttttcaaatttccctcagaatgcttgagatcagacattattagcatggagacaatagtttcattgtcaactcctgctggtttgggtacatttacagtaataaccacaatccactagcttgaattattgttcaacattctatgtgacttcatgagggtattaatatgcaagagagttatttgatactaatcaaagatacacatttgtcttcacacttattacaatatggtaaggtaatcacataaaatacttaagatggtagacttcatacatatatatatatatacttttaatgaatatactaaagctaaccgttaatggaagctttgacagaaactcattgttcaatatccaagcaaatcaattttggactataaatgcagaattctaacaagcaaaaattctaatcattcattttatttttctgttattcgtggcttcttatattgttaaggcttaacatattaagatgcacataggatttaatcttcatgagagagcaatgaatacatcattgaatacataccaatcatgtgtaattgttttcatatgtatgtaagcccagcggaaaagagtcgttcattgacagtactcattttcccatttggtgtattttcctaattgtacagtataacagttatagtaaatggttataaatattaccctttagctgtaacatctatgacatttttgttgatcatgataatatgtgattgtttagtcaactgagtttattgtaattgagattggaaatcactataagagtgaaattgaatatatagatagagaaataggataagttaatatggcagctcaacactgaacacagactacaacttcttgaccaccgaaatatgcaaaatattatataatagcttgtatctggacagcgtgctaagctgttcacttgttctttatcatttaatcctcttttcaaatatgtgagatatgttctgagaagataagcaccttgttgagtcatacaggtaatacattttaaaggaggaatttatatacacttaagattgtgtgtgtgtgtgtgtgtgtgtgtatgtgtgtgtgtgagagagagagagagagagagagagagagagagtttcaggctccaagacagatattaatggtagactgcctttgttgcataactgtagcagtggtgtacaactgctactcccatcttctcagtacttcatctctttctttgaatcaactacagctattctgatggctagattatgatctgccagtttgagaatccaactcttgctggccagagacttacagttaaaaaataaatcatttagagtcatatgcttatgtactactgggctgtgatcctcaccctaaagctcactttggcatagctctttacttgccatcgattcttgacagccttatttcagaattcttacagacacagtgtctatttaattttaatacaatcaagcaatggtttctggacatatttggctatttctttgaaaacaatggaatctgtcttatgggcaaaatgacttttttctgccctaaatgctgacactgaattgcgttcaatcatgacagaatttgtgcaatatgaaaagtttgtccactgggtggacaatttctatctagcatttttctctccttcagggatggactttaagttgatttgacaaaattggtttcatatgaacccaaatgcaaaccctatattatctttaaacactggtttctgtgaagttgtttgattaaactaatactgttgactccctgttttctgttttatttctttaagatgacatcccttattctgttctgctacctgggacattgctcttctctccatattaattaattaatattgtttcctaaatctgtcttcctagtctctgtgtttgtcttcaccatgtgtattgggatatattctcgaagggtttcatgtgtgaattccctcttgagtcaaattgtacatgtaatttcccttcattttaaaaataaataagaaatatgagaagaattttcaaaacttttatgttctatatgctttcctctggtttggaaattaatctctgaatttatttatattttaggtattgcaatttgagaattagaagagttgtttttacaaaacacagaaaacagcttttgttttaattatttttcccagtgtgtctaagagtcaaaaagactctgtattagtattcactggcaaacagaacacaatgcagagcagatatcctagaagcaacatgatagatccaatcatccgattcattatagtacaaatattgtaatcaatcataatattcagtgttccataaatccacaattctgtgaaagggataagaaaaaagaaattaagctatcagtgagtttactaaaaaaggaaaagagatttcctgattatcatcattcagaattagtcagacatatacatggtaatcattcatattttaagcaataaaaggaaactcaacacaaagcctggaaagcaacagccttttatttttattttctctaagatgtgaaaaaatagacctaggtgctaatttaattcccttttaagttaatgacataatgggtttgtggagcattaaatagggaataaatatggccttacatttccatgtcggagctaaatgctttctcttccctcagcttctaattcctcagctgagggaagtgatcagcagtcaacgatcacaatgagggagctacgcacacatcctctggtttcctgagctttggaacacttaatgcttagtgcagcttctctattttgagttctaccatgaacccctctctgatgactcccacatatgtcttttttatgtaagcacaccaagttcagctatccctgtaggtagacagcatttgagacttctcagttgggtatgatttgagaagataatggagctgatcctcttgacataaactagcctattggtcctgcccaaactggtgttccctggaacagaggcctaaaaacaaaatatatttaaaatgttcaaatatatttagaaaatattgtgttaaatcaagttagccagatttttgttgctttcattgtcatttttgttaatattgttgcatgatttccagaatattcagtatgcaaataaatattcattatgaatttaacaaaataggtattttctaaacttctttgaccttggaactcttgttctcccttcccaaccccaccattgcacttattttaacattgcactcagcagggctatacgcatcaacattttgggaatttgaggatgaagatatgtttttcctattaaaaatgaattcttatcccactgggaaagaaaacacattaagcttttatcagtctttaacattttaacatggattagccattctgctctttctggattataagcagctgagagcaggctttcattatagggagagggaaagatgatctgaagtgtcatgtgtccccagagaggattttcaagtggaatgccaccatgagagttcctgggctagcagaggacaacttcatatagtgcagggttgcagcaaggccactgacaccagctgtatatagaaagttatgtttgcctcagtttcttcagccaaaacagaggaaatttactagatagtagctatctccctcttagctctaacaatacaatctgattatcttgatggctaagtgtgggaactgagagagttagaagagtgggggtcactagttgaaaaagcaaggttagaaatgaatgttttctcagtcatggctggcctagggctggctctgcaggagttcatgattctcatctccccaaacaacaaagagccatggaaaattcatcagataacagtaattcaacagataacagtataaagactatacatatttttaagatagatttaaaaaatgcatgacatatttctggcctccaatgagtgttcagtatgaaaaaataccaactagatgaataagtataggcaagcaaaagattctaagtataagaaagtgtgaaaagtaaaatttattttatttttctttgaaagagcagtcttcccaggtcaagagattagaaagacaagtaaggtaatgcctcttctctgaagtttagaacagatgaaagtgacacataaaagcagaataagataaatattatatcatagtaaaaggaatgagaggttgtatgtagagtggttgtggacttggactcaagagcatgtggacacaaatttctaggttaaattccctggattcagaacccatttctaccatcttactaggtctgtgtcctcttgtgtaaatggtagtggtgatgataattaccatgcctttctgctagaactattattaggaggattaaagaaaattaatatgtataaagcatctagaagagtgcctcacataaaataacaaacataagtatttactatcattaataataaattatatccaactagaatcattataaggggttttagaaaagaagtagcaataagataataagtgaagaatgagtaaatttttgaagctacaaatggattgaacatagtactctagggagagggacaatcatgaatgaatacatcaagatgaaaagtcaaagggtaaattttagaaatagcaaatagattggtttgctaatataacatactggccctttactgatcatgttgatcattttgtgagaaaacagtaggaaatgacttcagaaagaatatagtttggtaaaaaccattttaactgtaggagaatgaaactggattctcatctctcaccttatacaaatatcaactcaagatggatcaaggacttaaatcaaagatctgaactaaaaattctagaagataacattggaaaaacccttctaggcattggtttaggcaaggatttcatgaccaagagctcagaagcaaatgcagtaaaaacaaagataaatagatggaacttaaccaaactaaagagcttttgcacagcaaaaggaatagccagcagaacaaacagaaaacccacagagtgggataaaatcttcaaaatctatccatctgacaaaggactaatatccagaacctacaacaaagtcaaacaaattagcaagaaaaaaatgaacaatcccatcaaaaagtgggctaaggacataaatagacagatctcaaaagaggatatacagtggccaacagacatattaaaaacatgctcaacatcgctaatgatagagaaatgcaaatcaaaaccacgacacagtaccaccttactcctgcaagaatggccataatcaaaaaaataaaaaaataatagatgttgaagtcgatgaggtgaacagggagcatttcttcaccgctagtgagaatgtaaactagtacaaccactatggaaaacagtgtggagattccttacagaactaaaactaccattagatccaggaatctcactcctgggcatctacccagaggaaaagaagttattatatgaaaaagatacttgcacacacatgtttatagcggcacaaatcacaattgcaaaaatatggaatcaacccaaatgcccttcaatcaatgtgtggaaaaagaaaccactgtatatatatatacgtgatatatattgcatatatatatgtgtgtatatgtatagtatagatatatgtatatatatagtatatatacacatgatatataatgtgtattatatattatatattatatataatatatataaatatatattttatatatataaatatatatgatggaatactactcagccatacaaaggaattagttaatagcattcacagtgacctggatgagattggagattattatcctaagtgaagcaactcaggaatggaaaaccaaacatcatatatgctcactcaaaagtgggagctaagttatgataatgcaaaggcataagaataacacaatggactttggtgactcagggggaaagggtgggaaggcagtgagggataaaagactacaaatagggtacagtttatactgcttgggtgatgggtgcaccaaaatttcacaaatcaccactaaagaacttactcatgtaaccaaacaccacctgtgcccagtaacccgtggaaataaaaaataaaagaaatttttgcccaaaccaatgtcctggagtgtttctccagtgttttcttctagtagtttcatactttctggtcttacatttgagtctttaacctatttaaatttgatttttgtttatggcaagagatagcattctagttttattcttctgcatatgtatatccagttttcccagcatcatttattaatgagactgtattctccctaaggtatgttgttcacacttttgtcaaaactgcattggctgtaaatatgcagatttatttctgggttctttattctgttcttttggtctatgtgtctgtttttatgccagtaccatgttgttttggttactatagctgtgtagtataatttgaagtcaggtaatgtgatgcttccagctttgttattttttgctcaggatgtcttggactgttctaggtctttcgtggttccatatacattttaggattttttttcgatttttataaagaacttcattagtatttcgatagggattgcattgaatctataaattactttgggtagtatggacattttagcagttactgattcttttaatacatgaacatagaaaatgtttttatttttcatatctttttcaatttctttcatcaatgttgtattgtttttattttagagatttttcacttctttagtttattccaggtattttattttatttgtggcgattacaaatgggattactttaattatttctttttcagattgtttgctgttagcatacagaaatgctactgatttgagggaaactcttctacactgttggtgggaatgcaaattagtatagccgctacgaagaacagtgcagaagttccttaaaaaagcaaaaacagaatggccatatgacccagcaatcccactgctgggtatttatccaaaagaaaaacatcagtatatcaaagagatatttacactctcatgtttatttcaacactagtcataatagccaagatatggagtcaaactaagtgtccatcaatggatgaatgaataaagaaaatgtggtacatattcatgatgaaatattcagccattaaaaaagaataaaatccagtcgtttgcagcagcttggatagaactgaaggacattatgttaagtgaaataagctaggcacagaaagacacatattgcatgttctccctcataggtgagaactaaaaaaattgatctcatggagacagagagtataatgatagttatcagagcctggggaaggaaatggggagggggataaagaagtgttcggtaatgggtaatgggaacggaagtacaattagatagaaggaataggatctaatgtttggtaacaaaatagtgtgactataattaacaataatttattgtatatttgaaaataactagaagagtggaattggagtgttcccaacacaaagaaatgatgcttgcttggggtgatgcatatcccaattatcctgatttgatcattatacattgtatgcatttgtcaaaatttcacgtgtggcccataaatatctacaactattaagtaaccatgaaaattaaaaattttacaatttaagaaaagttaacttgacgagaaaaagaatacagtttggaagtcttcgaggatagataggaagagattttccatttaatttggttttaaatgggatcttgtctatgtttgctcagggtaatcatatgaaaggcattataatttgaaagcttaatctcaaaatagtactttttttggtaaccagttgtcttgcagcaaaaacaaaagcactgaacttgggtcaaaatacgtgaattcaaatccatactttataccttcagaatcaaacactctaagcctcattgcgttactctttaaaataaggaaagtgcatctaaattacacattgtttttagtagcaaataagttagatgaaaaagcatcaaatgtaatgttgggcatacataaattttcaatcaacttttaactatataatattatctgaacaagacaagtgaagaatacaattgtaattttttaaattgcaaggcaacagtttctaccctaataatatctacattttcctcataaaagtcagtgcatcagattctatacagtatgctcttcaaattcttggctccaaagttagcaaattaaacatcccatctcatttctagtttgcagtgaaattctcaaaaagtttccagaatccctgatgttactcatcctgagctacatctgacttctaatcagcatcttttacttagaatacagatagcaaatctggttggcagttattttccaatgattcttctgccatactgatgctttataatggctccaaggaaaggccattctacaaataaaagcaaaattaataaaagaatgcgggataattgacagttttgctacaacagcatttaatttgaatcctttgaaacttactcttcactcattgatttttaggctcacaaattctttgtgtgaattctctcttttacttttgcattgtgaaatgatttatcatttgggtaattttccagaattacactttattattttgtaaatggcatgcagcacagatggatattagcaaggtctctgtataaacgccagcaatagaggtggtaacattgccctgagagttttctcctgaaacaaatcaaataaagaagagaaagcattgccaaagctggccatgacagaggaagtggatccaataatagacatctcgatggatacatatatatgattcaatattgtgtgacctttactttcaaactcactttcagaaaatatattctaaaggggtgccaaggatattgctgtctactctctactgacttccatgaaaggaaacaccattcctctgtatctcagtcatcaatgagtacatttatgaaagagtttggccattgtcaattctaatgccgttaagaagaacttgagcatagcttacatttttttcctcattttactcctacttgtatattgctttggcatatactattagtgcaatgctgtgacttccaaaacttctcagaaagtaacaacttggactgttaagagactccagcatttgaaatatattttaatgcaaactgtctccctgaagacctctatccatagctaagatagttgtatccgaaagctttgcgcttacttctttgcagtgctatttgtaaacattggcatagtaagagtgataaatttctatggaatcatctttatcaaacatacattatagaagtagaacttattccagctaaccacattatcatgaatagcattttccatatttctttgaaacaatacaatagaaacaatattatcttaaacattaagtatccccattgattggtccagtgaaatactgcttggaatgaaggcttcaactttaaatctatttaatcaaatttggtaaaacaatcatggatcaaatatattattaatgttacgtggcttttattattattattattattgcaaaaattaggagccttggtttttgtggccttattctatttcagttagatataatatctcctggccttgggtgctttttacatacaaatggggtaaaatagttattataaagaatagagattgaatagatgtgcttagagtaatgtctgacacaaagcaagcactcggcccagcacagtggctcatgcctgtaatcccagcactttgggaggccaaggcaggcagatcacgaggtcaggagttcaagaccagcctggccagcatggtgaaatgctgtctctactaaaaatacaaaaaattagccaggcatagtgccatgcacctgtaatcccagttacccgggaggctgatacaggaaaattgcttgaacttgggaggtggaggtagcactgagctgagatcccgccattgcactccaacctgggtgacagagcaagacctcatctcaaaaaaaacaaaaacaaaacaacaacaacaaaaaaagcaacggctgttaattgccaggaagaagagctcctacaattgtttcatgtgcatttaggcactctcttccatgtgagaccccaagcagtcagcaggactatcaaaggaacccttttaagacttagatatctatttttaattcttgcactgcatttctactttgataaggggaaaaggcattaaaacacatttttgaaatgtaaatttccaaagttacaaaaattaacccaacacatcatatgctctttgaatcacttaaattggcagctgtcttataatgataaaagacctacggcgttcttagatgatgtctacatgatgccagacagctaattgaattaaggaattaaggaagatatcaactagtccttccccttatttgccagatgaagaaatggaggccaagaaatgtgtagtgatttatttacatcaggggttgagtctgttggtcgtgagaacttctagcctagttattttttccaccccatctatctgtcctgaaatttggtttcttattgctgcagcattgaagagatggaaccactaaaaaaatactgataaaaagatgtttatccagaggcaactttaatggcaactcaaactatttgaaatatgatggaaaatttgttactgagtgaaaaggccatcgcacaatcaaaattgatgtttaaagctcgcctactaactcttccacactatccaatgtagtggtcctccttcattttgctctttagagtttccctaattttctttatgcatgcatctgatttcatcttactttagagaaaatactaacagtgtatgtctagaacatggcagattggagccttatagcacgagaggcagggaaaagacagctaatagcgattcactgataggagaagaaggggtcccatattgtttgagttttagataacgtttaatgatcttcctggataacagattctatgaggattttttttttttgcttgtttaaataaaagctgattcaatgataacaaaaggagagacagtaacttcagaaaaatatagatatgctaattcttacatttgtagagcccttttgatattaaggttcaagatctaaaaatgtaattctcattcaagaccgtataaaaattgttagttctatataagcatattgaatcactgatagattaaagcacattcatcatactctagaaaacaaggaaatgtgtaatatatttgatgtcatttttattacaattgttaaaatagtgaagaataaacctgttaactagaaatctatgcatgcagaatgtcttattacctaaataacaccagataaatgaggtgttactgtccacagtctcacaacagagacatgaaaaacccttctttacactggtaacccttaattaaactgaatttttggtgtgtcccttcaggagaaggtcaccatatcagcaataattaggggaaatggcattgtgaacattactggatgagatgtggtgtatttcttactttcaattattgcctccttgtttgaatcattagcatttggcagatttgttgctgaatttgttgttctgatttaaaactcggtgtaaggttgaatatgttcttatcttgatcttatatttctgccatgacttgcatttcttgctgagtttctgacttgaattgctctatgtttttgctgagcttttgctttgtcttgttgtatttctatctggaggggtttccctccgcctttttctttttgttatatctcttctttggcctattgtatttctctggcccattcattagctttttttttcctttaaagttattctcttgttcagtatatgcagtacctaatcaatacgcttccttgcttgctgcaggatttccaacttactgtgttttctgtcagctttgatactgcctgagaggggtttctgtgctttggctaatatattgttgtctgaattcgcagtgttttcagctcattacactgactttaattttgatgtatttgtattttatccagttcaagtcatgtttctttcctctgtcaatttaattactttctgcctgggcaacattgtgtttatacaattgctgctaaagcgacaaaaggtttctatttaaattaccacccagagcatcagcaattcagcctaaaaaatatgcagaactcctctgattgatgtcttacctttctgtggataaggaaatctagtctattgagaggatcttctttatagaacatagtcaagcctggtttatagctgtagagtcattaacagaggagatgagtgtagggctatggggtcactgtatgacttctctgtaagaaaaaaatgtatgactaggttctattcagtacaagtcatgtcctaacagcaggaaaaagaaaactttcttaggtgtttaacttatatttaggtgggctacccaagctccagctcttatttttctatgtgttatatatattatacacatttctgggtttgaatcttgttctttctaataattttgcattgggctgtgtaagtcaggaacattgaatttccattgtgtacataaaactatagcaactggtctaaaaacaaataatgtgggaaacatagtaactgttcctgttttcaaaggcttacaataatgcgaaaaaaagggaaaagcttatgagcaatacatctttgaaaacagaaacagtgaaaacactccagtaaatacataattggttattaatagaattttaaattggagaggcataacaattgcaacagctcttggaaatgcttaggaaactgaggcttataggtttacccgaacatatgtcatagataacattaatcaactagctgatgaacatgaccagcaaatgcattgattgcctgatcagcaaatgcttcaactgttttgttttacaagacttaatatgtttaaacaacaacttactctttacctactttttaaaaatatccttctgtattttctgcaacaaaccattgttgagtccctgtgcttaacaaaactgtgcaactgtgctatttacccagaggaagaagaaagatttttttaagtcagttcttttctggtaagtgtaacttttctagtattggataatctttctgagcctcagttttcttatctgtataattggcataaatgaaccatgagaaacaaataaaatgacatattcagctcagtgtgtgtcacatggtgagagacccattaagtttgctcttttccttttgcctttctcttttcagtgttcagtcattatactgtcaaataaattggagtttctggcttttctcacactcaagattattatgatatactacactagtacatctgaccttgataaaaagcaattttctatagtttaattgtatagcaataggatgggaaagtctctgattctcactctgtagcttcttcttcccagggctggagtcatttaatctctacctttaggctcattctaccctggtcccttgggtcatgaattcatctggaagattcagacttatgctttaaggctctcagaaactcaatcttgcagaagaatctggcctccattttgtacacactttgttcaaagagcctcctagcaccttcccaagacccacatataccactcccattttctctcttggttctggtgattgactctctttatgttcttggaaagctgcctagtatcctaaaaccagtattgctgcctggctgttaccaggctgcaccctcgactaaagttgatcccctgcactcatctttggactctagatttctattacatgcacatcccttgtgccaaattatgctggcttgtctggccttccaagtttcacctattgttatgcttatttgtcagttcaagtctctattccagctctatcccacttccttctttctttagcctgtgtccctctcttggatccctgaaacattttgagtactagctactcctatgtcctgcccatgtgattaagaatgatacttttctcccgtgcttgcagctgggtagtcatactccatacccacccaggtaaaaatgtctggatccaaatctacctttcataacagatctgatgtgctattctagacagctttactccatgatatattgcagactttatgtaggttaacaaagcattatggtgtcattcttgtgacagccctacattttcattatgatttttgtgtttgcggtcctttttgtgacaatttcttttagatgaaaatgcttttaatgaagcccttttggtacttgggagcctcactggaatggatttagtacaaacttgccttatttcaaatttatgttcaatattgaacaacactgttacccatatttaggacagtagacaggtaaaggttgcagaatttttatgaaatataaagcaatatccactgttataatgaagcactacataaaattgtataatacgtgagtttcttattcctcaaatagtctaactgattgttcattgggctcactcagccaaaagtagagggaaactttgtacagacatcattagtttttctccatttagagattaatcatgaagagctctggctctttaattctgtaatttgtatatttaatgggctgctgcagaatctatgacagtaattagcatagcctgaaaactcattaatacgcaacaacatgattaatgcagcattaatgcaaacatgactgaagttatttgggttatgtagtaagaagattaaagctaaaatgtcctgtttgttttaccagtggtgagtataatagagtggcaaaaaaataaaataaaaacaggtatcaaattagctgtttaaaaaaaagaaaaaaaccagcaaaatttaaatcaaggtgattttatttttcccttaggtctaaaatttgggatataagttatgttctttacttttatatttattcatttattcataaatttatcattactgaaggaaagttcattcaaccttttagtttaacatagttaaccttttagcagctttaacataatattattagtcttacattggaaacaattttaaattgtactaatctttgaccaatacattacacatttctgttttgaaactaatatatattattggctatgccaaataattaaaggatttgttcctacttattcagaagttacatattatgccctcttctcactgtgttcacctcttaaataaatgttcaaatactttataaaatactaccataaaactcatttttttaaacaaaactatcaaatatgacatgttaaatactgaaataatcaataatgtttggggatgtaaaagtatataagttttgcttgttcttgctgtctcatgtaatcatattgaagtcctctcattcttacttttttttggcttttcttttttgagacggagtctcactgtgtcgcccagactgcagtgcagtggcgccatctcggctcactgcaatctccacctcccgggttcaagcgattctcctgctcagcttcctgagtagttgggactacaggtgcccgccaccatgcccggctaatttttgtatttttagtggagacgaggccgggtgcggtggctcgcccttgtggtcctagcactttgggaggccgaggcgggtggatcatgaggtcaggagttcgagaccagcctggccaagatggtgaaaccccgtctctgctaacaatgcaagagattagctgggcgctgtggcgggagcctgtagtcccagctactcgggaggctgaggcaggagaatggcgtgaacccgggaggcggagcttgcagtgagctgagatcgcgccattgcactccagcctgggtgacagagcgagactccatcgctaaataaataaataaatacataaataatacagacggggtttcaccgtgttggccaggctggcctcaatctcctgacctcagatgatccatccaccttggcctcccaaagtgatgggattacaggcgtgagccacagtgcccagccattttttttttttttttttttttttttttttttgctatttagtatgacctgttttaatagcggtcctaaactttaaatgacttatttttcaatcttatagtcaaatgtcaagagtcattaatagtatctcaaacaaaacttgcattttaaggttaagcaatcctggatgactgaaaaaaatatgtatctgcttttttgtacttattttattctaaatccacattagaaaaatgtttatgattttattctttttcaataaaaaaaaacaagtgaatatccacgaagtacctgactcttggctaggtgttgaggaggaaaagcaaacccatcaatgtctgtgcacttggaaataaccatctgggagaagagaagctcctttcaacctagggatgtctatagataagaatgaaattgcaccatagaaagaaagcatatcaacattgcctgctaccaacagatggcactgttaatggtttgtatcacaactgtatttgtgggaccaatagatttgctaacattctcagaaggtagtctggaaggagaagagcctctgttaaggcagtgaaatgatatacatgctcaattttgtttaattatcttgtcaaaattcctggaaaaaaataaaaaaatatatttatatgggatatttcgtttaattaaaatacatcatcttttaccaaaattaatatatgtgaaattaaattgtagtagaactttaaaacaacatagagttcctattgctttgaataattggtctttacatttagtattatattatatgttatattgttatgtataccatatatataatgttatattatatactgtaatattagagtagcaactgatactcacaaagctaaacaactcagttccactgaaatataccagattttgacttagttttaaaagggaggacctagaaacagagagaaaatgcatcagtgggtaaaatcatttacctctaatgttttatttcacctctatggtttttagtgtactagagagctgtttaatcagaccattaccaaattgaataaatggctacttagtgattactgaactatttagtgatggggttggggagaactccttttttaaaaataagccttttgaatagttcatataagaccatcctaataaataaaatggaacagaatgtgtttgccatgtaatagcttagtgatttttaatttctgtattgtgatgaaacaaccagcttttctagaatgtagccagtcctttgtttctcagaagctgtgcacacttgcggcattcagtcctagtgctgccataacagagtttctaaacactagttcagaaatgagacatttttgtttagtctctgtttgggcacagccaagagtttaagactgtacatggagagaaacttgcttttttctgtggatgtaatccaggggacctgttgaggtctttaatgggtggctgacaggatgaactgggcattcaatattaaagggtggtatcatagcaagggggttaccccagcagagtttgtagatcaggaattgtttagagcctagatcttgggaaagtgaacaagaagcatgttaactaaagataaaaaacagaaaccaggtattgtctttttaaactctgagctcttggagtggcgatcatgtcttttccatattagtatctccagtgatgagcattgtctgttggagacactcaatatacatttcttgaatagagtaaggatttactggactttgacacagaactaaggttctgtgtgatagaggtctgtgtgcttatgagaagctggactgtgtaggtgaggatgctaaggctcctgttcccatagagaagtccttgagatggctcaagctgctggttcccttttttcttggactttgcaggtattcaaggtgtctctagttagaagctttatgttttgtaatgggtaaaaatagtgctaaaatatatagctctttgctatttataccaaattgagggtctctcagaacaaatacagtggacggattttaataataatagctaatacttatatagggccaaatagttctgagtacttttcatgtatttaactcatttaatcctcccaaaagacttgtgaaagaagaaactctcgttgcccacttctagaggaggatattaggtgtagaaaagttaaacgatttgtccaaagttacatataaattaagtgcagaagctagtttttgaaagcttggctctagcatttgttttttaatcattaagccaaacatcaaattccccttcccacactttttttttcacttttaccaaagaaatatcttaacaaaatgactcctttggaggaggaatacatgcatatatatatctgtgtatacatgcatatatatatctatatatgtgtatacatgcatatatatatctgtgtgtgtatatatatatctgtgtatatatatatacatatatatatgtgtgtctgtgtgtgtatgtgtgtctgtgtttctgtgtgtatatgaggtcagagtgagggccaagaagctattttttctctaaagtggttcatatattgcaagtgatttaattgagggaagatatagttgtattagctaaaacacttaaaagtttataaataggtgtgtctacacaaaggcaaacattcctctaatttctaaacagtttttacttctattgaattgaatatgcctaatattttagtgtcctgatgattaaagtatgaggaatgaattaataaccaggttcaaatatgtgtattgttaccatgcagatctgttaatacttattaattcccacatcagtgtgaactaaggaaaatgaaattaagttgcattaagaatgtgctcagttatatataaagatttacttcctgtaagagtgattatataattatatggtttactaaaatagttatgagattttattctttcattcatttgacatgcattattggaatcttagtattttcaaactacgtatttggagataaatattgcagtctgaccataatgatagtttaggtattccttggcctggaaggaggacactagttcattttattaacatgttctttgtctgtggagagcctccacaatgccattttagtaaaatactggatctttactaaaccatggctaccaaagacaaagtgtcattctaggcagccaacagacttcttgccctactcctgacaagcaaaataaaatagcctggggtaagagaggtaatggccatgagttaagtcattttcatagttatgctaaatcagcttccctcaggagcacccccttcctttcctttctctgtttaaatgaggtggagtatgatgtgactattccagcacactcaaaattagatgtgtgatcaagtattgatcttcaggaagttcctaatcctgtctgatgttttctgtgttagctttttttttccttctgtcataatgttagattagccagcaccttcattttgttattcccttactttttaaggcaggattcttctgtacaagaaccctgaagcgaccctaatattgtatccaaaatgtagggtcagaatcaggagtggagactgtgagttcattgtgagttaacagtctattatttaaaagtgcaacaagaaaaatagttttgctttcattccatttctgggactctaattttttccaagggagtctggcataaagtatcgtattggtccaattgcttgggatccactgagattgttactagagagggctttggtgtaaaaccccagagtaaaattctttaatgtccttttgggtcattgaacactttctaccattatgcttgacatggacaccattgaaatcattccaaggtcaaggtcactcagcaattttactaatgcttcaagttagtggaattttatttttccccccataatgcttgttttacaaaataaaatacagtatattttagtagatattgtaagatcaatttttgaaatttcttttatcaaaataaatataaattttatgaagtatctgtatgtttattatatgtaaacgtgcaattacaaatatgaaatataatttatatacatgtatctatgcatgcacctggatcttatttgaggtataaaacatgaaactagaactaatgtgttttacaaatatacgtaaaaagttattatttttttaattttatagaaacacagagtaagtaatgataaaaattcatttgtattaaaaatatttttataactacaattagtactaacattttgctttagcctaagcttaaatgctttatttgctagagtcacttgttaaaatactaaaaattttacaaggtatgaaggtaaaatagaaattatttcaaaaaaacaaaaatgcatgctgaattttctcttttcctttataaaacaagcaagtcctttatgtagatttctacaattcataattcaatgtcattaaatggcattcaatttatattttagactattatgatttcaatttgagacacaattgttttccaaatgaattcaatgtggggtatatttatgtaatagatgaaatgtatttcatctattttggaattgaataaattcaatttattcaattgtttggaattgaataaatacagtacgtataaagggaggatgaaaatgtacaactattggatgttgatagaagcattctgaataagaagcatttttacaataaactcaagtatatttttataatgtactttttaataatacactgattttaaaagtcttttttataatgtactttcatatattttttcttgagaaatcttgatcttgtattgacaattgcataaatatatttgtgcccagcacaatggcttacgcctgtaatcctagcactttgggaagctgaagagggagaattgcttagtccaggagttctagaccagcctgggcactgtggtgagaccctgtttctacaaaaaagtcttttaaaaattagctgggtgtgatggcacatgcttgtagtcccagctactcaggaggctgaggtgggagaattgctgaggattgtttgagttcaggaggtcaatgatgcagtgagctatgatcacgccactacactcaagccttacaacagagaaagaccttgtctcaaacaaaacaaaacaaaacaaaacaaaacaaaacaaaaataaataaatatcttggtatgtaagggcaatttggggttgataatttggagagggatggaaagatacatagatgcctatatctacatagatagagctctctctatacatacggatacagatataaatagatatctatatgcagatagatatatatctatgaaaatacacatctaaataaccatagatatctattaatatctatgtatctgtatctatctatacattttaacttaaaactttatatacacataagcctatagttctatatttgtagctaagtttaaaaagctattcaagggaagccctgagttgttcttttatggcatctggtggcatttcatatttgacgtgttggttgctattggtgtttgcactggtgaatccttccactggaaatttcatttcttcagggtttaccaatcacctaaaatgttttctttctggataatatcccctgactgctttcttcctcttttagcctaaagtttcctaaaaatttaaaatgcattgtagtcagctttacttacctttcacagaatagcaactcaagaagtgtatgctaagaggaggaataaaattatgtaaaaaatgaactagaaacatagttacctaagacaaaaataataagtggacaaaccaagagtaaacattttacttaagggtttaaaaatgatatcaatttttactagttagggacaatgaataatgcttatcacctccactgttatttagtgttgttctggatgatataacccatgtgtaatgacagaaaaaagaattatggctgttgaaaaggaatagatgaaatttccagaaaataagtttatacctaaaaaagccatcaaaacctattataaataacagaagtacaataagatggttagctataaataaatacataaaaataaatattttttccataattcagcaataacaaatctgaaaatgatctgattcttaatatcaattaaatatataataagtactatagcttaacaagaaatgtgcaggatctatttaaggaaaagagaaaagaagaacttataataatcattttaatacaaaagagtgaattagttgataggtagctaaaagcagaattttaaaaatttactaaaaaaagcaattttgtaagtaaatttgtaagtaagaaagaaaactggaatatatccctatctcactttacatgtcaaaataaattacaaattttatatttaatactttattttttccagaaaattaaatataaaaatacagaaaatgaacagaaaaaatataagtaagttacaaattctgggctaggaagcccaattataaaaagcaaaggaagacgccattattgaaaacatttagattttaaaacaaaaataaaccccctttttacatttaaaaataacatttaaaagtcaattgttaaaaaaaagtaaatgactttaacaagtgacagacaaagaaaccatacccttaatgtggaaaaaacgcttacagatcaataataaggatgcacaaatgacaaaaaagtatccaaatgaagaactacgatgaaagttcaaaatcactattcatcttgtaaatacaaattaaaactagaataagatttcattttaaatctatcgaatactagttggcgtctttcagaaatgccaggccaaactattcctgatgctagaaatgttttgcctgacagtggctgaaaactatttataacatatggaaaggaaattacacaacttgagaaatttcttgcagtgaactcagaaatgaaaaggcggttagatgacaatttcagttcattaatttataaattcacatgctaccacagattttagagatcatgcaattcagtatctccatttaagagtaggaatctatgggctattctgctcaggaaatcagcactatagcatgtatatgtatttcataaagtatctggtggatattactttcttgttttgtttttttttttttttttttatcatttggaggttgtaaagcatgatcagtccttataagggtcacatttagacagctacagattttaatcgttccaaggaaggaatgggggattatttcaaaagacgaaagaaaacattctttgatctaaaagcagaaccaccatttgacccagcaatcccattactgggtatatacccagaagaatataaatcattctaccctaaggacacatgctcgcgggtgttcattgcagcactatttacaatagcaaagacatagaatcaacctaaatgcccatcaatgacagactagataaagaaaatgtggtacatatacagcatgagataccatgcaaacatgaaaaaaaacaagatcatgtcttttgcaggaacatagagctggaggccattaccgttagcaaactaatgcaggaacagaaatctaaatactgcacattctcacttataagtgggagttaaataatgagaactcatgaacacaaaggaacaacagacactggggtctatctgagggtgaagggaggcagaagggagaggagcagaaaagataattattgggtattaggcttaattcttgtataatgaaatcatctgttcattgaacccccgtgacacaaattcatgtatgtaacaaaccttcacatgtaccccacaacctaaaataaaagtttttataaaacacatttctttgttttatacagaccagaatgaaatcatttctcaacacttcttttacattaaagcacattattcttgtttttttcctcaggtattgccctactttttaatcctaatctatagttccattgtaatttttagaatgctaatctaatatttattgaattcttttgtagtaagcaactgaaaaaaatttaattttcaaaaggaagaaaaaatacatgtttaaataataagataacacaactttggtattctaaggaatgtttggggattcattccagggcgctcatattttcaggttagctttcaactgttattttgtcgagtataatcaatggagattttgttattcatgtatttatagagctggttagccataaatagtttatgaatggagacatttctagcaccacctaatggcagtcaagtaaaaagaaaaagtttttctaatttaggaactgttttgcataatttaaattaaactatatagccagagttacttccatatgaaaatgaacttttacattccctaatgcactaactaggcatggaaatccatctctgagcaattggattgagtaggaatgaagctgaagggatatttgataatgaaaccaaggggtttctgctgtctttatgtgtgcaagaataagaaaatacctagctaatagaataaattaattttatgtgaaaattttctttttagtttcagaagcctatgcatactagattttccatactgtagtttcctgaaaaaagtatattttgagtattgtattggcatattttatttgtcttgtttttcagcagttatttatacatctttgaccaatttattctactagtttaataaagcgttttttaaagtttctgatagtttttttaaactgagtcatatcattctgattataatattggaattttctgttgaatatgagtcaaagaacatgctttagatccgtaagctctactcatttatttcatgtgtttcctagcaggatttgaagaatgtgttgtctgtcataaccctaggattgagatcaatggatttggttaatgtatccgaaggagaaggagaacttagcgatagcagcagattctgacacctttcatcctcgtctcaacactttggtttgatactttcttctatgatataaacagggaatactaggcagactgcagatacaggtagttttttgtttgtttatttgtttgtttgtttttgagatggagtctcactcagtcacccaggctagagtgcagtggcacgatctcggctcactgcaacctccaacctccgcctccaggattcaagtgtttaccttgccgcaacctcctgagtagctgggattacaagtgtgccaacgagcccaactaatttttgtatttttggtagagatggggtttcaccatgttggctaggctagtctcaaactcctgacctaaagtgatccgcttgccttgacctcccaaagtgctgggattacaggcgtgagccaccatgcccggccagatacaggtagttataaaaatcaacaagaaagagacagtctggtggtggtagtagtttcaagaaagtgctttctcttcgactgcaatttcttcctttctatgaacatttatttattgatgccctgtaatgcccttcacttctttgtgcacacactgaattttaattcagtcttcacagtcctgcttaaccatcacagcttctgtgaactttttctgtatatcattttgctctcatttcaacaaaattaatcacttttgctattttatagctgtagattacatatccctcttgtactgggtctttataatattttgtactcatttggatacaaatacttctactgctataggatgggtttcccttaaagtaagtattatgcctttcttgtttatctttattattcagagcaaacatgtattttggtgaaagcaaaggcaagttaatggaactgatgtatctttaagttattgtctactgtttattttctctagttttatgttttaatgtaggctgatgttttcatttcttcctttcattaatccatttctttattactgctaaaagttaactagtatttgttgttagttttttgttttcttttgttttagagacagggtctcactatgtcactatcttgcccaggctgtactcaaactccttggttcaagccatcctcctgccttggactcccaaatagctgagactataggcatatgacactgtgcctggctgggtttttgttttgttttgttttgttttgtttttgttatttttaacatcatatgatacttgattgacttttctaaacccgtggattaatatctgcttctaaagtaaaaaattgttaaccttgttattgaaagctagaaagagaaaatgtctggcttaaaggctatcctaaatttttgaaaaattcttatgagaatataatcatctatataaagggtacatttggaaaatacaggtatatctttaagaaagattcagaatttacaagaaaaaatattgaatatgaagatgattagacaattgaacaaatatgtagataaatacatcaatttttacaaaacatgaaatagcattaaaaagagaagaatttatcactgctatcacttatcactgttgcagaggtccgattaatgcagtaagaaataggagtttaaaagttggacataaattgatcagataattattattttctgataatatttcctgtaaaatccaagataatccactgaaaatatagaaccagttgaacaatctacaaattgactggagtcaagagaaatatatataaaacagttgcattcctgttctcacaaaattactcataaaataattagaaacttctgtttcaaattgggatgtagaacagtaagaaagaacttcgctttcatggtaacaacaagaaaaccagactaaagaaatatctttttctatgagtctgtcaaggagcaagcaatgcagaaaaccctggctgaattgaattttaggaagaaataagtgcttcataggtgatcagagtgctgtggcagcttccatatctgaggctaaacacttgttcagacagcggaggagtatgctattgtagatggggagaatttttaaggtcaaggggaaaccatccacccttagacaacaatgtagcctagtaagatgaaattagatctaaaagtctaaatgccaaagcaagtagctcagccccaggttacactattatcctccacacttgaattttgctaagataaagtcagttgaagaggccctagaagtggattcctatgaaattttgccatgattggattccagaattatgaataaatttaatccaaatatgagccaaaaatatttatagtcccagccaagtcccccgctagctcaaatgaggataagatccaaaaggtggcatcaccaatggttgaaggttgagctaaacacaagtgaactaaatacaattaaagcccaacttcagttctacataagtcagtagaaatgtatccacagattgccaaattactgtaattagaaagcaaagaatttaaagcaaatattgtaaacatttaaaaaaaattaaaggtaaaattcatataatggatgaaaagataaaatattttaagagataaatgatagctctaagaagaaataaaatggaaattctagatctgaaaagtataaatttacaataaaaactttattggataagtataatagcaaattggtcagtgcagaataaaagattaatgaatttaaacacatatcattatgaagtaaccaaagaaaaatgaagagaaaaataggttaaaaaataaacagatcgataacatgtggaataatatcaggagatttaacatacatggagatgtgggttccaggaagaagaaataggcagaaaaatatttgaagaaataactgttgctaaatattcaaatttgatgatgaaacaacctaaaaatgcaagaagctcaatgaattccaagtagaataagtataatatagccacatattgtatactcacagtccgattactaaaaaaaaaagattatggaaataaaaaccttaaaatcagctagagaaaaggaaaaaggcactacatagaagaaaacaatgaaatgaatgaaggctaacatttcatcaaaaataattgaggctagaagataatacaatatctttagaaactttaaaacaccaatctcaattctatattcagtgaacgtattattcaaaaataatttgaaagacatttttagattaaagaaagagttagtatatcatgaatagtcttgcattacaagaagtgctaaaaaaagttttaggctaaaaataccaataataactcaagtgtgaggaaaaaatgaaggaaaatggaaattaaaaatgtgaataaacagaaaatattattaaaaactcttttgaagacatttgattagtgaaaacaagaaattttaaacatattctgcagtttacaacatatataaaattaaactgtataaaaaatagtacaaataattggacaatggtaaatggaagtatgttgctgtaaggatcttatatgtgaagtagtataatgttaatttgtgatagtatgtgtgttaagaatgcatatgatgatccttagagagccattttaaaaagtctaaagtctacctagggagatgaaaaaggtagcaaaatggaatgttaaggtaactcctctaatccataacaaggtagggaaggcacagcaaagaagcaaacagcaaatgcaaaaaaaaaaaagaagaagaaagtaagaaaagagagaattcaaatagcaagatggtaaaattaagttaaaaacatattaataattatgttgaatataaatgcacataacacaacaatcaaaaagaatagattattaaactggctaaataagcaagacttacaaagggtgtacaagaaacacacttcaagtataaaaacataaaaagcttaaaagtaaaaggatggaaaaaataaaccatgaaacatttatcataagaaaatggtagtggcaatatttatatcagccaaaattacctttaagaccagtaatattactaaacagacattttataatgatagtcaattgattaagaagaaattatcctaaatgtgcttatatgtagtaatagagtttcaaaatacataaagcagaagtttacaaaccaaaggacaaaatagacaaattcccttctatatttcaagatttttaaatgactttcttagtacttaataaaagaagttgataaaaatctataaaaatacagaaaaatcaaacacactatcaacaaacttcagtgacagttattgtacattctatacaaaactggaaaatagctattgtttttcaaatgtacatggaaagtatgtatatttgaaagtatgtacactacaaacattctacagctaatatgctgggccataaaagaatcttaatatatttaaaaagttgaagtcagaatatattctctgtttatatagaattaaattagaaatcagtctgaaaatgctatctggaaattttctaaatacttcaaattaaacaacacatttctaaatgccctaccaattaaggggaattttttaacaaaaaataaagtataacatgaactttttggaatgcaccccaagtaaggcctggagagaaatgtataggttaaatggttatcttagaagaaaaaagtccaagctttcctaagcttcttcttaaaacaggcaaaaaagaacaaattaagaccaaagtaataagaaatgaaaaaaattaaggcagaattggatatcaatgaaatggaaacagaaagcaaagcccagaattgatttgcaagaattatgggtgttggggaatggagagtggtaaggggagagaaggaggggggagagagaaaaggagaggaagagagagaaaaaaatattttggattaattttaaaaatctatcgatatgatttaccacattaatagaggaaatagtatagcaaaatatcatattatctcaatacagctgaaagacatttcacaaaattttatacctattcataatgaaaactttcagcaaactaagaataggagagatgaaggaccactacaaatattctacagaatacatatacatatatatatatatagtatacatatatgaaatgtacactacaaatattctacagctaatatgctgggccgtaaaacaggcaaaatatatatacaatatatatttaatatatatttattatatatacttatacatacttaatatacttatatatttatatatataaatatataaaagtgaaatagtgcatgttttgattttaagatagggatcaagttttcgttcaaactttaccagtagttctagccactgctaaaacaatacgataatataaaagtcataaatatagaaaaggaaaagaaaatgtatttgtcatcgacataattttgtatgtaaatgctttaaaaaatctttgaaaaagtgttaaaactaataaatgaacttggaaagattgcagaatacaatgttaatataaacaaaattaattgaacatactagcaataaacaatttaaacaaagttggatttaaaagaatattcaaaacatagcacttaaatttaacaaaataaatgaaaatatttgtatagccaaagctataaaacataacttagaaaaatcaatgtaaacctaaatagatgaagatttatcatgtttgtggatgaaaaacaaaatattgttaaaatagccattttcctgaagtcaatttattcatttaatgtaattccaatcaaaattccagcaagcttttttgaagaaattcccaagttgattctacaagttgaaagacctagaatatccaaaatactattgaataaagtattaaaaaaatggcaaactgagccatcttatttcaagatttaaaataaagccataataattaagacttcatagtatttgtactggcaaattaatcagaaatagactcagacttccaatgtcaattaaaatttgatagaggtaaggcagttcaatggggcgagtacaatcttttcaacaaatagtactgtatagtgtataggagtcaaaaaaaaacaataaagcttgacccctatctcacatcatgcatacaatttaatttgagatgggttcatagacctaataaataaaagctgaaattataaagcttctagaagataaatgagaaaatatcttgatcatcttggtgttggtaaagatttctcagacaaggtacaaacaaagcgctaaccattaaaaaatggtaaattcaacttcatctaaaatattaagaaaatgattgccattctaactgatgtgagatggtatctcattatggttttgatttgcatttctctgatggccagtgatgaagagcattttttcatgtgtctgttggctgcataaatgtcttcttttgagaagtatgtgttcatatccttcgcccactttttgatggggttgtttgtttctttcttgtaaatttgtttgattctggatattagccctttgtcagatgagtagattgcaaaaaatttctcccattctgtaggttgcctgttcactctgatggtagtttcttttgctgtgcagaagctctttagtttaattagatcccatttgtcaattttggcttttgttgccattgctttttgtgttttagacatgaagtccttgcccatgcctatgtcctgaatggtattgcctaggttttcttctagggtttttatgcttttaggtctaacatttaagtctttaatccatcttgaattaatttttgtataaggtgtaaggaagggatccagtttcagctttctacatatggctagccagttttcccagcaccatttatttaatagtgaatcctttccccatttcttattttcgtcaggtttgtcaaagatcagatggttgtacatatgtggcattatttctgaaggctctgttctgttccattggtctatgtccaacaatgacagactggattaagaaaatgtggtgcatatacaccatgaaatactatgcagccataaaaaatgatgagttcatgtcctttgtagggacatggatgaagctggaaaccatcattctcagcaaactatcgcaaggacaaaaaaccaaacaccgcatgttctcactcataggtgggaattgaacaatgagaacacatggacacaggaaggggaacatcacacaccagggcctgttgtggggtggggggaggagggagggaaagcatttggagatatacctaatgtaaatgatgagttaatgggtgcagcacaccaacatgacacatatatgcatatgtaacaaacctgcacgttgtgcacatgtaccctaaaacttaaagtataaaaaaaaagaatcaaaactttaaattaaaaaaaaaatgaaaaggtaagtcaaagactggattcggctaggtatatgtttaacttagagaatgccaagcagttttccaaaatgattgtttaattttgcctttacattagcatgtatgagagtttccattgcatcacctattcagcagattttggtgtttttaatttgaccaattctagtgagtatggagatgtgtctcattgtagttttaatttgcagttcctggatgaatgatgacactgaacatctttctcatgagcaaatatggttatttgcatatcagaatttttagtcaagtgattgtttagacgttttgctcattttctattgggttgcttggctttttattgagttgtaggatttttttatgtattctacatgtccattgtaagaatttaaatttctgataaaagattaaaaaaatctatagtaactttttagcagctttttcattcatactagggacttgtattacaggttccttctcttgatttggattttggaaggcaaaattttcatcagctgaaatgtattagttcttgatttctttttgttcttacaatagctttgtatggctattacttgacaatttccaatcattttgaaatgtcttacattttcctgtatctgcaataacaaagttaagttgacagggataaaggcttttggatggctttttatgtttcttagttcaagagagacacatttggtttttgaaaaatgtttgtgttgaagtctaacatacatacagaaaagtgcaaaaagtagcagtgtgcaggttgacccatttttataacccggatagccttgtgtacccagcacccacagtacaaaatagaacactactgggcccccagtgggcctgccttgtgccctttctaaatcccagccaggattacctctatccagacttctaacatcatacgtggatttttgtctagttttgaacttgatataaatgggatcatacagtatatattcctgtgtacttagtatctcttacacaatccatgtttgtgagattcatgtatatagttgttcattctcattgctatatctgttgtttgtacagttgagtgacacgtgtgtatgtttcagtttgaaggtgtaatgaaaggtcttgctgtaaacatacttgtatatcttgtgaccctatgcatttgggtggggctggatgtagatccaggagtagaacggctggatgaaaacatacatatatcaaaagatacaagggtaacttttttgtttgtttttgagacggaatctcgttctgtcgcccaggctggagtgcagtggcgcgatctccactcactgcaagctccgcctttcgggttcacaccattctcctggctcagcctcccgagtagctgggactacaggcgcccgccacgacgcccggctaatttttttgtacttttagtagagacgaggtttcgccgtgttatccaggatggtctcggtctcctgacctcgtgatccgcctgcctcggcctcccaaagtgctgggattacaggcgtgagccactgtgcccggcccacaagtataacttaataaatactgtcagtttttaaaagaggttgtacgctccaactagtagtttatgaatgttgcatgtatagatattattacattatatattataaatttaacattttactttttaatttaatattatatataaaaatatatgtaatatatacgtgtgtgtatgtgtacatacacacatatacagtagttgcacatatttggctacactttgtgtttccttttcattttagccattctaatggatatttagtggtattgcatttcattttgcatttctcagatgactaatgataccgaccatctttttcatattttttttttctggctatgtatcttggtatcagatatatgtattgcaaatatctgctttcactatgtcatttgtcttttcattctcttattcataccttttgatagccaaaagttgttaattctaacatggtctaatttatcaacttttccctttatgttatagcttcacatttatcgtttaagaattctttgcctaatccatggccccgaacgtgtatgatttttatgattaaattttaaagttgtaaacctcttacttgaaagttaaatatttccatgtagaacttggatttttcatatttttagaatgttaggccatggatgtaagtttattttacacatctcatgtataccatttgtacaaagtatgtgttccttaaatatttcctgaatgaatgaatatagagatgcatgaaatgctctattgtttaaacactagaaaccaaaacactgaactttagaacatttcctgtctcattttttgaaaatcaaagtctaaatttcagaaagtgagaaaagtataattttcacttgtctgcccattttagtcagtgtttcagcttaacacaaacattaaaagcaaaaatattttggcactgctgggctctgatccacagctcttcttattcctgggcccaggatgataacacattcatgaggcagaggggaagacaagttcaactacacagctgtattaaaatttctgctctcctgcgcacaccgcatgtccactttcatttctttggccaacacaagtcacatcactaagcctaagtcaatagttgggaatctgtaaatacataatcttcttataggaaaagagagtgttaataattttgaatagttatgcatgttaccattctgtctcacggtagagtcagtaatgttttctttaaaatgttttatatgttaatcaaaatattatgtttatatttaaatgtattcttttttatttagttcatttaaagaattgattacatgatttcagcatttggctcaaaagatagaatttatctatatctatggcaataattaattgtcaagaatatgtttcagtgaacgtgtgcatttttaattttgtcatagattttgcacaaaagacattcattatttattttggcagtgtaaagagaaaaatgagaagattaaattatttggaaaatgctgtgggaaagtctcacatacaccatcaattccaattgcctttttttatactatagcttcccttcttaagaaattttccttgatctgtgtaaaatattatattttagttgcactagcagtgcattttctcatataagcataaaacttgaaaattaaataatatattttagaaaaacacacgaacttgcatatttcttaaatagtgcataatttttatgagattcccacgtatatcttgtctaaatattcctgtaattcttactgatttattttcattcatcagatttctcttgaattaaagacaagtagttgtcttcccagattgagcaattattgatatcttccaacacccaattccttgtttttattctcctctctactgccacatagatgactccaacacactggtagagagttttgctctcttcatgttccaaattatagcatttttgtgaaataacctcaagctgagtaattttataggaataggttttattataatatatgataccaaatatcacataaaaagtggtgacagaaagataagatttctcaagtagtgttactctgaaccataaggagagaagcttaagagaagaaaagagttggtagaaatataattgttctctgctcaggttgtagaccagactctacgtctatgtttctgctggtagatgcttccttttatctccctggtctaccctgataattaatttatatgtctcccatttctttctctatcagatttttctaattcgtgttctgtacccaccttctactcattcatttcctcagtccttatcacccagcagtcaagagtctgtccattctacttaactgaaaaagattatgtcattaccagctccgtaagtttttcttcagttctaattattctggacctattggaagtgtttacacagttaactaaccttgcctccttaaagttccctcctatctagatttccattttacaatattatcttgatctaactttattcttgcccttgtttttttcttttctgaaatgtggacatttccattaaaggctcttgttctttttctacaatctgtctcttagacatggcttttgataggtgattgccaatgtattttcctagcatcgtcttctcttctaagatttagtttctcatttccaaatggcaggcagagttttctgcatcataagttcagtatgcctaaaactaaagataattcctaaccccagatttccttccttatctgacatttctatttctgttattaatgccccattttcctcaataattggtgaaaagaatggaccattttgccccacaccatcacctcatatcaatatgtcttaatgtgcctttcctggtatgtatagagtttatcctttcaattactaattcagttacttgtctgtccttgtcttattctcccaaagcacagcactcacctcttttctgtgtagctaagttacgtctcctccctacatttcatcatgaattttgttgccttagtctcaattttgaaaatcctattcctgctctccactcaaattttaatttcttccattaatttatgggatatgtttcaaatgggtggctcaatcatttcagtgcacttaataggggagatgagagagaacaatacatctagtagcaggagtccaagtgtgtttgactactgaaaagcaatttgttggggcaaacaattctattctgtggagtggaagagttgccaggaaggactgcatcctgaatctgacagcaagaacacaacattcaagcaggccagagtaagagaagaagagagtgtgtaacaatgagaaataaaaatcactaggacaagtttgttgaaaatgaccaagagcataaaacgtagaagatggagatgcagaagtcaagaaggccaggataaatttgatttgccttcttggaaagtctaaagcttgtatcctaaacttaacctttgctgtgactaaaggaatagcactctaaaaatgacttagaacacagcattctttttcatctttgtcttctatacaaacttctcaagccagattgtacagatgtggtctcacctatttctccagatttatctaactgtctccctcacaaccagccttcctcaaactttccatacctctaggactttgtacaattcccgccaaatccttcatattctctaaaaacaagctgaagtactatattatctaaaactgtcctcaatttcttttaatcaggtattttgtatacatccctataccatttatcacattgcattacatttttttaattgtcttttttctcaactagaactcaatgtcagttatgggcttattagtttttcttctttgctgtgtatcggagtactattcaacaaatgttagtgttccatagatgtatgttgaaaaaacgacagtccaatgttcaccaaatgatatctgctttcctgccttcaaatcctagctaaagtttttctcttcagacatggcttctggagtagttgctgtctattgaaactgagttaaccaccacccacctatgtagggcttttggttaccagcccagcctgaaggaagatctccttcctttaaatttttattatcctgcctgactgtatttttactcaaatcagtattcattcattattcactattgtgttcttgagatgttatttgattttcatatatggtcttgagctcttatttgattccacaggataatttgttaagacatatacatttaatattttcaactaaactggaaattccttgaaaacagagattgtgtctcttaccagttttaatgcattaagcaaaaagccttatacagggcaagagctccacagtatgtgttgagtacgtgggatactgagtagagtggagatggggccatgtaatggtaggactggagatggggccatgtaatggtagggggaaggcatcattcataggactggagatggggccatgtaacggtagggggaaggcatcattcataggactggagatggggccatgtaatggtagggcgaaggcatcattcatagggctggagatggggacatgtaaaggtaggggggaggcatcattcataggactggagatggggccatgtaatggtaggggggtgacatcattcatagggctggagatggggacatgtaatggtagggagaaggcatcattcatagggctgttgcatattgcccctgcttcctaagctgtggaaatttctatgagaaaagagcattgtatatcctatgatatgcagggctagtatgtgctctgaagggtcagtaaagatcccaaaattctgaaggctgcaaaccatttggttatagggtggtgtttcaggaaattacctctataggcctcttcatggcaggtctttccaatattaacttctattactgaaccgattctttaaacttcataaatattttaagcaagaccctctgtgtttctttcactcttgtcaaaaacccatttatttttatgactctctgataatgttttcacattgatactctgagtatccaattttgggttgacaatatgtctttttgggttgatgagttttgcataaatttaaacttcattatatattgattagcaggaatgtgggcataagattccaagtactgaatggcatttaaaatgggatatatttaaaaccaaatggcctagaccatgcgagtatattgctgtgtataatttcctgactgtactcactacatcataaataataatgaaagtaaatgtacatttatcagaaagaatcaacaaaaccccagcactgatttgctgatcacacttgtcttaccaggcattaaggccagctttcgaacaaaagtgcctgaaggtttgattgtctttgcagcatcacctggcaatcaggaagagtattttgcacttcagttgaagaagggacgtctttattttctttttgatcctcaggtaaatgagaaatcataaactttaatatttttaagaatttagtaggtgcctggtactgaggtaaatgcttctgttttcacactgaatcttcattcaaaccttgtaaggtaagtactattattatccccattttgccaatcaagaaaatgaaacttacaaaagtaatgtgacttgccctcagctaaaatagcggagctaacttttaaaccatcatggtctgactgagaatctgtgggcttaacaaccaaaatgccaccttataatgaagattaaaacttttaaataaatttaaagagatctatttttatttttcttagtagcaaaaaatcatgtccccttttcttccttccctgtctttcttttttcattgtttcaccagcaaatatttaagtggctatcgggtactatggtactgggcgttgcagactaccatagtttcaaagttaaatatgaccatgcccctgcaaaggatacagtaaaataatcaatttaaaattcttataaattgtatcaaaataaagatttaggattctatgtattataggaacataaaataaagaaataaattgttttctgagttgtcaattttctctggaaatgtgatatttaactgagatacaaatcaatgaagaaaagttggtcaggacaagattatatgtctgtatttgagggtgtatatttcaggtggggcagtacaggggagattctgatctccacctgggaaggtgctgagcataaagtttccaggcaaagtgagcagcaaatattaaggaaatagcaaatattaagtgcctgaggtggacgagaacatggcacattcagtacactgagatgaatctcttatggctgggaacagagacaaagggaaaggtggtagattgaaaagctgggtagaaaccaagtcatttaagaccttgtaagcaaatgtgaggatatgaatttttcctaagggcagtgagaaagcactgaacagttgtcttcacttgagttgaacaaatatcagtgagcatttgatattaggtattgtattaagcatgtgagatgagtaagagaaatgagtaagactaagtaaaatatattagctttccattttctcagttcttcaacttaaaactgatgatctaaatcacacgttatgcttgacaaataaatgttttacattttattggtaaagcagacacaacgttcaccctctgtatccaagttgcgtctaggatcatggactgagtgatctgactgaggatctcagcctcatgaaccctggagatccattgaccttagagagaaaaggcagggcctattgtaccaagtgtatctgaggaccctgccagactcaaaaagcaggccaaagtcctcctgctttatgaagctgggagagccgcacagtggccactcgaaggaccagggacagaaaggctccctcctcatgacttgacagggctctgctaactccctggctggtgcacagcaggtcctcagacacaaagatttctgagcgtcccctagtaatgcagcttcttaaaggatgccagcaggtgggcagtgagtaagcaaaaggaaatagcatcacacctaagcagatcctgcagccagagggaaaggaagaagcagcagctatcgcagaaggcaagacagatggcaactgaaaaaaatttttaaaaaatcagctgaagttgattcaattacataatggaagatattattttttatttgaaaactttaagtagattaattagaggagagacactgagcctcagattagtaggtcagaagattaagttgaagaaatctctcaaaatacataaaaatgtgacaaaaacaagaaagttagatactactactgtcactaagaagcgaatcggaaggagaacaaaaagcacatgctcaagaaaaagagggataacataaaatgatgaaacaaaaaataggagagaatatctgatttaagagggaatttagtataaatccattgaaaagactcatcaatttcctgtcaagattaagcaaaactaatacttctatgagacctctttgtgccaggcattattctaagtggtctctctatacatcagtttgtacacttacatacacacatatgcctatacacacacacacacacacacacacctacacacgcacataaactcatttgaacttttcaacaactctgtgaggtagatactcttcatattcccattttacaggtgaggaatctgggccacaggtaagttaattttccccaagtcacaacactaataagtgaccaagccaggttataaacacaagcaattgagctccaaagaccatgattttagctacagtgctatactgcttttcaacatgaaagaaagatggttgttgatatccataaattcagaaaaaaaaaatccatctctgcaccaggttggaaagaaatatttcagtaagtaatctagccaaaaggaaaaataacagagtcagaaatataaaaagaagaagcatcagtgaataataaatctagtaatattaagttatgcctaaatatttaatgatagagtgactagaactctgttttacagtgccaaatgagaatctttgaaatagaagagaagtatagcaaaggcaagaaaaaaaacgtgaataatcatttgttgctaaaattagtaagatttgaaggagaggaaagatgagtgaattaaaagttctgaagataccagcttagtggcggggtgtgggtggaataagggaatagattatactgacgttttgttttcgttaaataaatagggcaaatgtttgatttcaaatgttatagaaaaataagttactactaataaaaagtgctcttcaggacatccaaattaacaaggttaaaaaggacagcaaatgctaagttaaaaaatcaacaaaaatcagaaaaagaaaggggagagtacagtaaaatagaagactgtcaatgagaaagaaaaatctggctctgctttttccccttcaacctgttagtatctggagatatttaagaagaagccagatggaaaaaaaactaatcacaggaccacttgtttatagagctttaaagtatacaaagtgagttcctgttaatgatctcatttcattcttgaagtagccccttgaggttgattttgttttcatccctgctttagatgaagtggcttaactacggtcatagagtggtttagggatagaactagcactgaattcaattatttgaatagcactgaattattttattcaatgaaactttgctaagaatttattggacttcacagttatgcactgggaacacagaaatgaacagaatgacactcattggaattctggccattggttgttcatcacagattttgagtatttatagccacccccctaccaaacatgggacagtcattggagaattaatccaaaaatgatttccccaagtctgaagcatgactgccatctcttttgacatgtggtgttgctatttctaaaggatgcgataccttaagactctgtaggataggagggtaaaggggtcaaactgcttaacggagaatggctgccaggaaactcatctggcaggtctagttgttttcatatcctttacggtgatcacctggacaggctggtgcaaagcgtggtaacagaattcagggaaacattcacagggcatttgcccatcatttccgcccccttacccttctcattcacacaattgcttagagtactcgtcactgctattagttttcccagttgctctgtccctaccctgtatagccaaaccctaagctgtatacatagtccgcaggtgccagccaagtattaataaaattgttaaagccactgggcgtggtggctcatgcctgtaatcctagcactttgggaggctgaggcgggtggatcacaaggtcaggagttcaagaccagcctggctaagatggtgaaaccccgtttctactaaaaatacaaaacttagctgggcgtggtggcaggtgcctgtaatccccgctactcgggagactgaggcagagaattgcttgaacccgggaggcagaggttacagtgagccgagactgagccactgcactccaacctgggtgacagagtgagaccttgtctcaaaaaaaaaaaaattgttaaagccaagttgggggctaaagggagtgaggaaggtttaatgatgtctagtaagtaaatttttatctgaaataatctctctccataaggtaaaactgcttgagttttcaggaaagtgacaattattttttaaaatacaagatatgggttgagcaggatggccttaggatctagctgagaaaatgtaatcagatgcattacactatgtgctcacgggccatgaggctctctatatatgaaacaacgagcttatgctagcaaggactgtgtccttccttacttccaatgaatttatactctaaaacaggtactaaacatattttctaaatttataatgaaagccccactcatttttagacaaagaagtgttaaaactgagggatggtgaaaattttgaatactcttctcttatttgctctctttttccaaagtaatatcaatgcagcttcttgtatgaagttagagctactctgggttttaaaaagtatagaagtttatttcatatgccttctattggcattacatttatttatattttaaatactttgggtaccactttaagtcagtttttctcctttaatctttaaatgcggacgagattatctagtgaatactttttatactcatcacacaagtaattatgtacttagtgtgtctgtcttatcagactgtatgatccagtgagggcaaagtctatgaatcttttgcccacaggtacttcctcaggacttagaacagtctttggaacatagtagatgcccagtaaataaatgaccattgacatattacctggctgattgactcaataactgttggtaggatactactactcataactgaagaaaattatccatttttctggcttacaacgtctagctttgtaatgattacacagatattttgtgatgtttgttttatttttttttattttgaaaaaattagagaaaaagtcttgctgttttgctcaggttggtcccgaactcctggcctcaagcaatcctcccaccttggcctctcaaagtgctaggattacagacatgagacaccatgcccagccttgttcaaatttgtctgtttttcagataatttgatttttatcaggaaaaaacgagatgcttatttttaaattgtttttactgaattcattcaaaatagccaaattttgaattatgaagagaatttcaaggaattttaaagtagttatctagcacatatttataaaataacttgaagtcattgtgtactttgctctttttaaaatatcttaataaaattgagtattaaattccttacaaaacaatttaatacaacgtagaggctatagatataaaaatgtatttggtttgtcatccaactatccgaagcattctattgaataaatgtttagggaaagggagattcttcatagtacataaaattggaaatgtgtttgtatattacaaactgggcacttgccattgttaaaagatacaataaagaaaagttaactgcaacttttaattacagtttttattgttatctccaacaattttctataattttcccattcttcacttaattaaattcaattttgaatatacttgatcagataatattttagtgaccagtaatgatctatgtttatcccttaaatattctatgttcagtgacattaacaggaaattcacatcatattctgggcttacttggaaggaagctgtgaaaatgaaagctttaaaacaattctgaatagcatctattgaatgtgtctgatatgttccaaatagaaagaacaacatgcataatatgacaccagaagtcatcacagaattgttctttcaacattgatggggggaagtaatcttaaaatagtcttcaaaaaatgatattctaaattgctgtaagtataaagtgagtttgtcatgctgaggctgtaggtaatgtacttgaatttgtctccaataaacttgatttctgatgtagagaactattaatgcttcagattgttgccaaacaaaatatgaagaaccacttattcagacacctgatctttagaatgcagcatcgtttgtaacaattttaacgctaactaagtacactttgatgagacagcatttaataaaatgctcattaatttcatcattagcaagggtatgctaagaagtaagccagtttcttatgtcacgcccaattagcatcccatgctagtaatcccattagtattgttgaattcactaatggaaaaactaatgggcatgctaccagggcacattaattgggcacgacaccagttctggttttaattattaaactacgataatgaaatgtgtgtttgtaaaatattaaaatgttgaaatagggttgaagaaaataaaagggtgtgtagacaaaacagatataaggaaagtcaacctacaaaaatacgaagactagaacttgccagatggtcatgtttctagctgatggagttgtctgtaaaagttgggatattgtccatgtgagagacaacccactcatactcatgggaaattaaaagctttttttttttttttttttactttggtaacatgaaattctgtatgtcatacatgttgtcgagctctttatgaggcccgacaggaaccaattaaatgtgtagagtggacatgttgtatcactgaagccatttcagagaaagataaacagaaatcatactaaagatggtatgattaacattgtatgtttttcaatatacatcttcagcaccattacatcaaacaattatctattttctctttttgaaaaaaacagcatagcaaaattattagagtttggtgaaattttctggtaattaagtgttttggtaatattttacccaatctaatttttttaatttttaaagattttattagaatgagctttattcttgttaagtaaatcaactttattaagaagaaaattcattcccatttagaagttgtaatttcttttttatttttatttaatagtagtactagtagctgttggtgacaaagttgggatatctttcacttagtcttattcacttaacacagaaaatgttactataggtaaccaaggctactataacatactggaaaattgtttacttttctcgaaagtagtgagatggcaggtgtttcttctatttctctttctcagtttttttttttattcttacctcctatttgctaaactctgttcttaatatctgccatttcctatgtcttatcacttaggaacatgtttttaactattatatgattaccttagccagaactataattattggattttaactacaaagcattgtgtactacatttaactccacccttatgtttaatgtatcacaactggctagtttttaaggtgaatgtcattcccatttgttattgataattttgtgaagataagagtgacttgtctgacatctctctatcttcagaactcattttgagtggtattttatgagttttaaatttttctcttctttttcatatttatgccatgaaacttaaagtctaaaattttagaatagaaaattctttacccttctgatgaatagctatattcatcagaaaatgcaagtgactttgtaagaaattcttactgcaaaggtgagacctttacagatctgtacactgtggtgcacagggaagtattaatacatcacaggaaagccagaatgatgctagacatcagctttaattttgagttctgtttgaaatgtatgcatgcttgtatcaggatcataatcttgaaacttgtaaattggtttataacaaatatgtgtgtgtttatttgtagatatgcatgtataaacatttatttattcattcattcccttaaggggtcaccagtggaagtaactacaactaatgatcatggcaaacaatatagtgatggaaaatggcatgaaataattgctattaggcatcaggcttttggccaaatcactctggatgggatatatacaggtaagtactttttgatatgtataaatagccctgttgatatgttggtgttgccatacttttctgttgtttatattcctacattcttatttcaccataatttctactcaattccatatatattgctgttgaatttgcctttgggatgctcctaaaaggatgaagtctggcaaccagtttttcatccatgaaggtctttggtaaagaaaaaaataacaatgaagtcacctatgtcttttacagttctttacaattcgtgtggacctttagttatgttctgtcatcttacttttgacttccaaaaaacacatacagtagaggaaagcagtttttgtctgcatttggagatgaggaaaccaaggctgagaaaaaagtaaatattttttcctaacttacacagttgagaggaagcattcttgggacacacatcctgttttttcacatttaagtttagtttttgctccagcctaccctatctgccacatttatgtaattataacatgatcactgtacctgtataatgatgcaggcttttattaaattattcaggaaatatctaattttaatcagtacctattatgttccaggtattgttctaggtgctctggatacaaggagcaaagagaatactgtaaaacttacattttatgggaggaatggggcagcaaaatacagaataaataaatttaaacaaatatcaagtggtgataaattctgagaatgaaaaagccagatgagagggaaagttgtgtgtgtatgtgcgtgtgtgtgttaagaaaggtctctctgatgaggtgacatttgagcagagacctaaagggacaaaggggaaaccatgtaaatatccaggaagaggatgctttgggttgcgaggacagcaagtatcagggccctgaagtgagagcacactacatgtggcatgtcaaggaccaacaagaaggccagtgtgggaaagagggtgtaaaagagctaatgacatgacataaggtcacagaggccattagggatcagattatatgggaccttgtgggcttttactttgaaagaaggaaactgttgaaggattttgagggaagaatgacataatatgacggctttctttaaaaggatcacactagctgctctgttgagaataaattttaaggggaatgagggtgaaggcatggagatcagttaataggcttctgcaataactctgtaataattcagacaagaaatcatggagacctgaaccagggtgataattgaagatataataagaagtattcagattctggttatactgtgaatgtcaaattaacaggatttggtgatgagattgaggcagaataggggttggtaaactatcaccatgggctaaatctagctcatgcctgtttttataaagttttattggagcacaactacacccattcatttacgtattatctatggctgcttgagtctgaatagtctacaaagacactgtctggcctttgacagagtttactggcccttaatgtcgagcaagcctgtcaggtttgggtctcaggcaactggaagaatgtagctgccaaaaccagggagtgcatgactgtgggagaagcaggtttggggagagacattcaaagttcagttgagaacatgttaaggctgagatttctaagacacccaaggggagatatcaggcaggctgctcaagaaacaagtctagttctgaagtcagaacttccagcaaaggatggtattgaaagccaagggaacagatgtaagtagggctaattggagtggattgggctctggaaaaacaaacacaaataactttgcctcttctctcaaagaaggtgggcattagaaatatgaacagggatttccattgttatgccacacagtcagagacccaggttcccctggcctttggccctggcagttcgtactggaacccagcccactattcatccctctagagtacttagggggtgcctatgggtagagaaaggaagaggcctgagaggcaggcggtctggatcattccaacatcatgatgctgggatgttgaggaagagccagtgaagaaaagtaatgaacaggcaatgaggagagaggaaaaccaagagagtggtatcccaaaggctggtgaaggattttattatttgctgagctagtaaaactagagtatcctggtgaaggtgtatttctcatctcctcttctctaggttcctctgccatcctgaatggtagtactgttattggagataacacaggagtctttctgggagggctcccgcgaagttataccatcctcaggaaggatcctggtgagtttagtaaggtatattatatgttgtcatccaaacttagaatagaacctgtttacattattttaaagtaagaataagtattatgttctacctcatgctatattttctatattaatgtgccaaaaatttcctttaggtctcttttttttaaaggaaccatgtattccatatgacttgtatttatattgttagtactcggttcttgatatataaaaggaattcattaaaacttttgctgaaatgaattataataatttcagtcaaaggtatgttattttaggacctatgcatagttttttctaagattttaaattgaatgtgaaacaacacagaaatggaaaactatgagcttgatttatactctaaatagggtgaagaacattccctgaatactatgtgataggcactaaaccaatccctagatattcatagatgaataaaatgtggtctttatcacaatagaggtcacaggcgtataaacagacaattccagcctaatgccattagtgctataattgagctatagacaaagtgattctcatatttttagaacaagagcataagaacatattctaaaatgaaactaattaaaatgaacatgaatggaattaaccttagataggaaaaaaaatcacccttcaaacgcaatgctaatattctaggattgtttcccaagtcctcattaagaatcacagggtgcctcccaagtctctcccaggaagttaaaatataactacataaatattacaaataagctagaacccagataagtataatttgttcatgggttgcagtctcagggaatcatgatgaagatcaaaaggaatagaaagtgttcatcaaatttaggagaaggatatagttgaatcctcaaggctgattatagttacctcctcagaaatgtctctagattagagagggttttcattcaactacttgagactgacagagaagtccctctaaaacacacacacacacacacacacacacacacactcacgtacacagcctttgttttttgcccttctgggaaatagtatcttcaggtactaggagagaataccctgatactaagtacccttcctgtagaggacacatctccattatgaataaccaattttactttgtctatgtaaattggccttataaaactctcataaactcaaagctgaaaactaagctttgcccccataggaaaggaggtggctgtgtgaaattcgacctcagtgcaccttctcctcctcttgatttttttttcttgctttttctctaattctctcatttgcacattttctctctcaaccttctgttatcaccctattcactgtatttataaagccacctctacctggtctggagagttccacattcaagatcaacactatatacatttcccaaaatatgaagccaaattattgatttacttcagtaacagactggttcatagatgaggaatctaaactgtaaactatatattaaatagaaacactcccttccaatctaacttttaaaattatagtactttatttttgaggctagtggcagatgaattttctgtgttagttgaaaaggcaatattcttgctactgcaaaaccaaggtttctgcataaacatctgtttctgcagatatgatgggtttgaaccagcactaaacattataattgctatcatttactatagctgatggtgtggtgtttacatgaatcattaagaggcttgcagtaaataggtagtgagagctagtgcctatttctttgactttaatggcacataaaattaattgcttgaaaataatctttcaaaatatatatttcttgatatctataaactcctgcagagataatccaaaaaggttttgtgggctgtctcaaggatgtacattttatgaagaattacaatccgtcagctatttgggaacctctggattggcagagttctgaagaacaaatcaacgtgtataacagctgggagggatgtcccgcttcattaaatgagggagctcagttcctaggagcaggtaatgctctaaaaaagacatgagtgttcacttaaaatctatgttctatcctttgtataatttaatctctcctgtttgattaacttgacctcatatgaacctagtatcacagaaatacttagttattccaatggtgcacacaaatatattcttgacatctgaatatgcaatataaattataagactcataagtatacatccatgtatgatatctctggtaactcatgcagttcttgatttacatatgttagcatcaccaatgtccatttgcaaatcagttgtttggaaactagaatgcagttagagaggtgtacttagaatgcactcagaaagatgtttcaaagagttttgtttactaggttaatccacaaatgcctatttatctcattatatagaagaacaatgttcttagttaattctcggctaggtaatgggttaagtaggccattgagagagaactggagactagaaccaccatccctgccattgctcaaaaggctacaatgaaaggggaggtgtaagtgtctgtagcttacccctgacatgcatgcacattgagtctctgcctgatcagagcagagacttccacccaggggaaggggagagggatgatggtggcttggtgcacccggcttgttcatcaaataaaagcccatcactgcctcctatatttacagctaagttggttggttattaagttgcttaaactgccttcagcacaaaaaggcatatgatattaataatataatctacacattttttattctgttttcatcaaggtcattctgagtttcttttagtcaatgcaaactacttattgttaatatttatctgaaacagtaataatcttacatgatacagacaacacatgatttagagagcaaatttcttcctgttaaaaagtataatatatatcaaagtctttcttagtatatcaaggtctttctgtcacttctgtgcaattacaaaaggaatttcttaacattgatttgcatcttcttttgtgagatttactcagtggcagactgtgtcctagagtttcttagcacccttacaatgctggcaatattgtgttacacatgctaatatgtacatatttttatctttaaagggttcctggaacttcatccatatatgtttcatggtggaatgaactttgagatttcctttaagttcagaactgaccaattaaatggattgcttcttttcgtttataacaaagatggacctgattttcttgctgtatgtgaattaatttgattaaaattactttaaaatataggacccaactttaaaataaataaaccatgtgttggcattacacttaattggggtttctttacaaattcacatttgttcattttttttcccagtcatttttagttttgaagtcctgtgaaacattttgtattttattatcctagtaattttttaagatgacaattgtaacaattataattttaagaaaacagactagatataaggaattaagaaaattcaatttagtatcttaagatatgaaaaacactatttccctcattatcttttgatatgagttttgaaagcatatatattatatatttttcatatgacatatagataatcaagtataataatatagtgaacactcctggacctaccaccacgcctgataactgaatattatcatttttggtctatctataaagtctttcctatcttgtttccatctcctttcagatgtcataggtaatcagaattttgtatttgttattcacatgcatttttatagtttgaacacctaatgaatgcctacaaattcttgcttttgaaatttataaaattggttttatactctctctttagcactcaacattgtttctgagtcatttatgtgtccacataggtatacattttcttggctgtgtagtatttctcttctcttaccaatgatgtattggttgttcccatgttttgcttcaatgaataagactgctataaacatttttatacatttctctaaatacaatgggcaactgtaactgcttttccttgtctttaatcattagtttgataccactgttaaatacgttattaaaattttaattcttaaaagttgttttaaagaactagcatagaaacaggagaaaaatatgaacatcttacccttagattcttgatttctaggcaaatagacaaatacaagtcttggcttttaagagtctaagatacgttcatctttttttttttttttttaacattcctagcatacacaatgccaatattgctaagaagggaaatggaaatttatcccttcatagtatttattaaaatttctgcttttttaaatatttgtttgtcctcttgtgtattgttggcttctttctctgaaacgtaatgtctatgaatcttctctgaaatgtaatgtctatgaatcttcgctgaaacgtaatgtctatgaatctaaggaccttggttctcttctttatagttgtatcttcagtgcctaagccttagcaattatcatgttaatcaatattgttgaatgaatgaatgagtgaacatgtgaatgagctcatgctgtggtgaccttcactgagcatcgttgagtcatctacatgtgcatacactgtggaggatacaaagatgtttaccatttggctcctcctcttgaggaccatatgcctgagctggaggtctatatgccctactatgccatgcttccaccctccaccttcctctattcattgctttgttactgtattaaataatactgttaactttaagtaactcttactaaaaaaaaaaaattaaaaaattaaggctgggtgcagtggctcacccctataattccagcacttttagaggcctgggattataggagggtagcttgaggccagtagttcgagaccagcctgggcaatatagtgagaccctttttctatgaaaataaaaataaaaataaaaagttagccagacactgtagctagttccagctactcgggaagctgaggcaagaggattgctgaagactgggagtcgaaggctgcagtgacctgtgattgcacctctgcactccagcctgggcaagagagctctgtctcaaaacaaacaaaacaaaaaaaaatcaatacacttagataaatatatacggagtgcctattatgtgcttggctttcttttaacacttcccatgcaactgaaaggaagcagtctttcataaaacttaacattacggtctgccatatctgaggactgaggctgctcccagattacccctcaacaactctttctattatactgacttatttcaatatgcatggttatcccctggaacttgataaactcagaatgtttccattgctgaaaccttgaatctcaaaatataacctcatatccctctagctctctcagtctctctcattaagttcaccaacgcattgacaccattggctattagcccactttctagttaacttacttgctccttacctgagccactataatgtatttcttcaaccatatttctaccaataccctgatcttgtgtcttgtattgggcttcacaaaccttgatccatcagtccagccacctcgcttttcagttctagtagctagattgctaaacactataggaaaactaatacgggtatgagaacttgttttgagctctccaattcttttattaaacagtatctattgtttacaggattttctaatatattttagatgtagaaagtgaaagaaaaataatcttaggatctagaaacactataacctgaatgtcttcaggtagtctcacactctcctgataaaaacaagcatgcatattcaactttcagtctctctatcaacttgaccgtatttgagccaagccagatttcactctctaccgactcaggggaacaaatgaacaattaccatgcttacaaccaaagaaaatatgtctaccgtcatcctagattctatcccttcctctgtaagaacttgttctacagtctcccctctttgtatgttcaactgttccctctcaattggctcttttccctcaatatatggaatgattgaaatttattttccttagtgttttttcttttgtctgtgaagcctcctccactgtacttttccttaccttcatggtcaagtgcattgaaagtggttacttttgttattgccactttttcatctcacttcagtccctaaaatgactgtacattaggttcctgcccctaccacacctttctacaaaatcacttttctaaagtggtcaatgacccccacatttcctagcccaatgatttttatttcttatattttttgtcctttttctgtcattctgtttttttcttattcttccctactgattttccaaaatactagtttctcctgatttcattaagttctcttagcttctttaaggagatcattgtcacttaaaagaactattttctactacaagacccttaaaacattggtcttgctgaggacactaatcttttcccttttctctcagtctttttacactcactgaataatcttatttattttgtcatgtattttctcctttttgctgggccatccccaaactgtgtatctttatgtttgacttcctcaaaaagagtttcatctggatgttttataggcatttcaaactcaatatatttaaaatgaactcacccctcctccttgtcaacaacaacagtcagcatttctttcaaatgcttttcataacgtgatgatggcagaacaccctcctagttacccaaaaaagatgagatgtgttcttaatttctttttaattcatctaactcatttaccttttttaccaggtcctaatgagttgcttttacaaatacttctaagattgagtcttctctttcatcagcatcatcattatccttattttaatgactctcaatatgttttcacaattaaatggatttcctaatgcatttcctgaattctagtcgagattttgttttcaatgtgtacttcttatgtctggtaggctaagcttttagtgcaaggtaatactgggaagaatatgagttttggtttcagacagacaccaaacattctttccataccagaccctcctatcactgaaagtcctttaaaatctggcttctacatagctggcaagacactacctcacctcccacctccatatgtaccctttgtcttagctaagttggtgcctttctctgaacctgatgtcctcatgtcatgcatattagtccccctccttgggggaccctccatgaatcttatatagtttctaaaaccttgctttaaacctttcccaatttccagggagcaaaaagccttctctgttctctgctttcactttactcctttcttgtcttgattgttgtattgctcccacatgtttgcctctgctactagacagtatgactcttaggagcagtgtttaccttagagcagcaggtatatggcacattgtaagagactcgatatttattgaataagtggttagacaaatgaaaaattgcttacctgaggtccttcctgaagatgatgcttttatggaaaaattcataatttttatctggcatgatttaatttgttttactcgacacaattgatctcaagattttaaatatcatatggttactgatatggtttctaacaaagtaaaaatatattaggtaaaataattatcatgagacattttgaaggaaaacctatgaacttattttttactatgaaaatttgggtgaaatatgttcacattagaaaatggtacagtcatctaatagaatacacatagaagcaattatgttagttaaagatttagaataaaaccgaaatattgaatcaaaatatgtcttacatatttgaaattgagttcactagccagttaaaataagcttaatcaagcttgacatttcattttcttattgtcttgccatattttcccccaaattaaattgatatatgaagtagtattttctcattttctaaaaattcaaagagtcatagttcaaagtgttctgttctcttcagtcattcagtcacttatgcaggggtttaatcttctaactatgttgcagcaaaagtaaaccttaggtctacataacatcgcatcacatcctataatcattagtaggtatgaatttgtttgcatcaatacaacattcttcatgtcaactataagctagaaaagtgtttcctatgttcctaagcagaaacttagggtagagtgacacatttctatagagtgctttcagggaactgttttgcttttcttcaagaaattgactttctgctctctcccaaactgcccttctgcagcctttttatatacctactttcttttttaatataaaatacagatggagctgaaaagtggaatattgaccttccggttaaataccagtcttgcctttacacaagtggatctattgctggggctatcctattgtaatggaaagtggaataaagtcattattaaaaaggaaggctctttcatatcagcaagtgtgaatggactgatgaagcatgcatcggagtccggagaccagccactggtggtgaattcaccagtttatgtgggaggaatcccacaggaactgctgaactcttatcaacatttgtgtttggaacaaggtaagttccatctggaggaattcacaaatccatacagccctggtgctaacagtttttggtggttctgtgtttcaagagatagcaatagactcaggctaaaagcagcacccaacagcatctctttttctggagaaatttaaaccttaaaaactaatgaaaacactttttcaaagagttttgtgtgttacccttaacaatgtgccatcatttataatcagcatatttatttcaatatgtcctcagtaaatagtaattaatatacatattattattaatgtgacatataattatatatgtggtacataattatatatataaattactatttactgaataaatatcaaaataaatatgttgattataaataaggtaactgaggtgcttcccaaagatgatatttatatggaaaaattagtaatttatatatttatttaaatatgtaatgcaattatatgtgagatacataattatataagaaatatatgtgtgtacatacataattatatatataattatatatataatgcatataaatgtatttcctcatatgttggataatgatcattatctgtatttacagatgaaaaaataaattaagttggtatgcataactagtaaaaaatatcaatgcaattcattgccttttctttctttgacataaatgctaattgtctccatagtttttcagtagagctttcatgtggaaaaaaaatgtggggtgtatgtggttgacttccaaacatacttgtgaaaatctatatattgtagattattaataactataagagaaaggaaaagtgcattatttacaatttaggtgagaagttaactcatagacgtttgaatgtaatcagagaaataattaatttgaaaaggctaacaatatctgtgtatcatttcttgtggcagtcatggttctgagagcttacatgagaataggtgagtcaattattcataacaagtgtgttaggcattattatttatatcctcattacagatgaggaaactgaagagcagagaggaaggtaactttcccaaggtcacatggctagtaagcagatagcaagacactaagtctctcaggcagcctgttataaagtcaactctcctttttacagtcaatgctctcttttatgggcattggtcaatgctcctttgtaaagtggggaaagcatagtaacttccagcataggaccaagcaccctcccacgtgtgaaaaaggtcctttacgtatttcaaaatctacataccctgaatggttaaaattttcatgaggcaatctttgcctatttggtaagtacataaagatttaaatgcctttgaatagaaaatatatggcaagctcttaggagacttttagaagggtagtagtaaggagttaatgaataactggggtgtaagacagtaatgacattttcaaggcacttaagatgtaacagcagctaaaaatattacattcatataagagcttctccaggttttcaggtttctgaggttagaaagaacttgaaaacccttcgtatgagtgagattacttaatcctgtttgcttctgggaaaaaaaaaataaaaacaagaaacaaaaaccctgcatgtacagccttgttctttgaattacccctaaacccattactattgatggtcctaaagacgtggctaaaaccaaaattgtaagataataacagaagtttaaaacatcaccatagacccaaagggaataattttacctacacactatgactaagtctgtgatactggaagatattttattagtgagtaatattaaatttttattactgtagtatcatccatatcagtggtctcaaaacactgaaaaaatattgacgtatggtagctggaacgtagaagtcaaaattagccattatttttactattcaagatacattgacatcacctggaatggttattaaaaatacagatgttagggacccctgtcccctaagattctgactcagatgccttgagagacactgatctatataaatagctgcatgttttatacggtgatcagggagactagtcacaatacagaggtgcagcatgtatgtagtcaattgcaattaaaacaaatcatgttcatttaatgtatttctttcaacccactatcaattgtcttaaaaacgtttttccttttctctgcttcttaattagcaccttttttttttcatcagaagctctattttgtggtcatattagtgctattttttttttaatctactaacgttgcaatcttcctccgaaccagatacaagactaattttctttcttgttttgaaaatgctgggcaacataatttgctgaagatgtgccagctcagatgatgagagtttatcttcttagaatgatcaatgaggataatcacttacatctaggttgggcatgactgggtctggcatgtggtctcacaggcaatgctctgcccaaacccctccatggagagggagagagtgggggctcaaatttagcaggcctgccaagccaagcactctgcagcagtactgccttccctagaggaagggctaatgtttttctgattagtcatcttagagctctgggccgccttttaggcatttagaggcccaggggtggtggtgtggatggggatttttttggattctcacaagggtagtggagtaagaaaagaaagcatttccactcctctcgcaaacatcccctttctccttttgttgtcctcgcatctcattcaaatgttttaggtctggggagcatttctggtggtacagagttgaaagcacgggacaaccttaactgaactctttggttgccactggaaggaccctgcactagagctcagcagcttcaagagctcagcagtctccaaggccagaggccagaggaccatttccttaggaggattagtgcttacaaacttcattttataactaactctctaggcctttttcttcatctccaaaatgaagaaagatgtatctccctgggctttcccaaattgaaaatttcatcttgtgaattaatttttatgatgttttttgctaaatttttaattttttaaacattatggtaaaatatatgtaacatgaaatttaccattgtaaccatttttaaatgtacagtttagtggcattaggtacattcacattgttttgcagatatcaccaccatccctctgaagaactcttttcatcctgcaaagctaaaactatgtacccctcaaaaaataatgtagcatttcttataacagcacttgtttgccaagctgccctttcactgttctgattttgttggtagggaagttagggtacagagaattttgataatacagttatgtgccatcagaaaattactactgataaatacattaaaattcttagcttctgaattttccagccaatgatttcatattgagcttcattgctttcaattcaattcacccaacttattgagtgtctactgtgtgtttaagatagactagcagtattgatcagtcaggactaaaaaaatgtggataatagtaaaagacatttaaaaggaaataggctgcaacttaatgtgttagaaggcataataagacatcatatgaatgctgaggagaacaatatggtcattgttactattaacttattttactgttatgcatttcattatattttatttccatttcctgctgctgtgctttaatcttgaaaagagctgatcatgtgtttgaggcctttcaaactttacagtgttttgttcggagagagagagagagagagagagagaacatgcacgctacagcaatctcaaactcggtcctgtttgtcccaatttcgtgcagttttctgcgcagagtactgccagacttcactgagctgatctctgttttcacaaaatagcatgtaattcaaagccactgctattccctggctaactggatgccttttttgtttgctgtctaacaaaaaagtggtgaatactctaaattcatttcatccgcattctctgttaaacttcacagaatggtactgcgcagtgggtgttctaaggtcacctgtgcagaatgcacattccatgaaatctcatggtgttgctattgccaacagtgaaggctggcccctgtcatgctaatggggatgtaaaactggtgaccattttgtatgttcaagattatggaactctgtgaaaaatgatagagcatagtgacagctcttctgtaggctgatgtaactcgggctaaattctatacctctgaagtgatcattatgccattcatggcaatatttcaggactaatatattttgaaattatgttctctctcctggtattctacataaaatgctcagagtgtatttttccccaatgagcttactgaataatcatgctaattcaaatattattttttggcacttaaaactgacttatatagtaacttaatctttcagaattaagagacatggggctatccccctaccataatatgaagttgcctaaattttattttatgggaagaagcggaatttagaaaatgtgggcctaaggaggtaaaataaatgctttttcagtaccaaaagttaaattagaattatccattaatgtgttttccaaataacagaactatatttctttgcaacaaattagcttgttaaaaagtaggaggcataaaaggttttccaaggaagactcgaaagtctagcaattgtatctaaccaccccccttcctcaaaatgtagtgctgcagaggacaaaaatgattggtaattaatgactcaagccctttatgcgatactaatcccttactatttgctaggtttcggtggttgcatgaaggatgttaaatttacacggggtgctgtcgttaacttggcatctgtgtccagcggtgctgtcagagtcaatctggatggatgcctatcaactgacagtgctgttaactgcaggggaaatgactccatcctggtttaccagggaaaagagcagagtgtttacgagggtggtctccagccttttacaggtaatgtggaggtcctctaaattaaatgttacatgtctcttattcatccccctttccctccctgccagcccctcattaatctatatgagtattattttaatcttgctgcatcttatttccatttaagaatacctgtatcgagtgatagcctcgcatgaaggaggttcagtatatagtgattggagtcgaggacgtacaacaggagcaggtaaatacttatcttcaaatgcatatgtgcacacacacacatgcatgtatttgtgcatttatataaaaggaaggactattaccctgaagcagtaatatttttgtagtcttctgacagagcatgccttggtttgaaaatacatctgtcaatggctaaaatgcttagtagatcagtgcttttcatttaccaagaattcactaaatacttgctcagacttgatcctttcctcttaggatgcagaagtaaggaaagttcaggttgtcttaaggatgtaatagtcccacctacctaacatgtctaaggataggtaacctttacagatggtgtagatagcaagaagctgaagtcagggattaggattatccttggctgggagtggcaccttcttgactttctcacagaaagcacatttgaaacctgcaactggttggaatcaggggtgtctatgacatcattgcagatgtttgccccgttgttgactattagaatcttagaatgactctcccaagagagaaattgctgattggtttaatatattttgaattggaaaagaaccaactaggagacagtatacattagacctaatctcagacaactgacttgttttgtacttctgactggccacaaaatcttttcccaaaataccaccacaggaaggcattcagcacaaagagttttgtgaatcagtgacattctactattttgggtcaaatatttgtcaggaaactgaacacatctccagatgattgccacttatgtctcagcaaggaagtttattcagcgagtatcaatttgtctaaagacgtgtttccatcaaggtattctcttatacttaatcaacagtaggttactatcccaggcatcctttgaggaatcttcttaatctaaaatataattaaatactgagatgagcaactaagaataattttcaagactctctacctacatattttccagaagaggacaacttgacacttttccaggatgatttaaattatcacctatttataggcaagacaatgagctgaacgatctcttaaaattcttttcaacttcagagctaagagaaagctccaatataaaatactcacttgttactgacatgttctctgctcctatttcacactcttctactttattaacaaatataaagcccgctttgagtataattcagcaacattaataggcgtctggaaagcacattgcttacttagcttaatagtccccattttgagtactactgagaaagtacacaaatagagctctgaatttatagcaatgatctgaccacagccctatgccataaattcatatttacaatctgaccacaacactgagcagctacatgctcccaagggttggagaataattgcactatttaattatttttgagtcagttttgctctgtcccttatgagaagaccatctgttagactgtactgtactttgccctgtaccacatttccgaactaataaaatcagcgtcactcccattgtccctttccttgcaactcgatcttgtggcctgtgtgttttctataggtgtctgtagtgttttaactgctcagagagtggttctcccctttggtgtttcctcttatcttttatgttcactttgtttcccttaaagctgtcctactttattggtctggacagtaaagtcggagaggaggagatttgatgtggaaaaaccagagtgatcctccatcgacagggctcaggagtccatgagcagctagagcaggtctctcatccatcatcctgccacggagttccttgggctctttctttgtgtccccagtgcactcagctgtgatgaagtttttactgatcagaactgtagaaatgtctaataaatagttaaaggtaatagattttttaaattagggggctcagcttgtaagtaaggttttgcagttcttttaaacttcctcattttgtgatattattttgaaatattctgcagaacaagactttgaaaatgactttgtagaatctcaaaggcaccagctcctttaccccacccccacccccaaaaactgcaactaagaatatattccatatatcatatctggtagaactttgctttttaaaaattaattagaaaaacaattgcatttggaaaatgggtctaggcattcaagtacaacacaatcacatttgtgattttttttttggctaatacatcgaagatataaaagtgtcaaactactatgtataataacagtctaattatcttgcttcaaagggggtacatcattatattgcttgaacttgttatctgcctaccatccacctccttctttatgagtgatgtttaaacatgtctgatacattaaatgtttttggaaaacctggactagacttgaaagaatgttatgtcgatggagttttgatggttttgaaatatcgcttaaactgaatggctcaagatgtgcagtcatattaaatcaatgctgaaaagttacaactctaataaattgtatttatgctaatggttgagtctgatttactgcggccattaaaagtgaagaataggagcaatagtcttctcagaactgccattttccctattttctcttttattccttcacagctccacaaagtgtgccaactccctcaagagtccgcagcttaaatggatacagcattgaggtgacctgggatgaacctgttgtcagaggtgtaattgagaagtacattctgaaagcctatagtgaggacagcacccgtccaccccgcatgccctctgccagtgctgaatttgtcaatacaagcaacctcacaggtaaatgcaatcctttaacagagtagaccctattaacttcctttttgtttgcattttaaataaaaatcttctgcaaatgttttttagaaaaatgtattaaatatacatgtattttacctgattaaaaacaacacccatctaaagtagtggaagcctgcatctacctaggataaaaaggataattctacaatgcgcatgggctctcatggataattttattctaaggtagatattctctccatcccccaaagattacatcataggtggctatagccctttaacaccttatagacatcttttggaaatcctatgtataaatacttatttcacaaagcaaaaatttactctttgggactagccccagttcataccactattatttattgtaaaattgctgattaaacctaattatctcaaggtggaggagtcttagagccccagttagttggactggcaaatcagtgaatcgatttctcacagtgtggtgtgccatgaagaatgattataatgaaatatactcatacacaccactaacacatctcacactcaaattcatgcgtgtgtattaagagcatttttcagcttcatgaaatattaaagcacatttaaagggagagtttaatttaagcctttgataaaagggaagtaaatgtgtcaaatttgacagaaaaaaaacattttcctctatcaaaaaatcctataacgtgaaccatcagaatggacgttagaaaagccttaaatattttcccaacaaacctgttggtcaattccctcaagactttacttccttctttagacactttggaatgcacagcccaaatatactaccaacttttagcaaaagaaaaacaaattcacacccttcacttctttcctattttaccctccttatcaaagcccagcctgagtaagcccacagcttgccttttcacaggttgcatatggcagctacatgggctggaaaataccaagtagtttattgctaaaaatgctcaaccccactttcagatgagcactcagtaatgacaccaaccctactgtatttccagaatagctccttcccccattctcctcattaaatattttatatttttccaaactatacacgttacctccctttctcatcccactcagctgacagcgttctattttagattatattagacaccatagaaaaaacaatttattttataggatttctattactttcttactaccaaatgtacatattaattgcatttttctgcctgatggagttgttattaggggttggatgaatgaatgcatgctaaaacacataaaaccattttgatatacaggaggtgtgtgctatgctataattttattttcattattatttttaattttcacgctttttttcctttctgttttacaaagcttctcttatcctatcaaaaatagaaatcttcacaagtcctctggaccctgactctttctgtttcttcagagatattactgatagcttatcgtcctctcacttatatttttaacgcctctgtctgctgcagtagagtatggcccaaggaccagcattactagcttcacttgggaacttattactaatgcacattctcctgccctgcccaccccacacccgccaaatcagacactctgcagtgtggctcagcagtccttgttttaacaagcccccagatacatctgatgtatgccagcatttgagaaccactgactgggtggattcttcccagggtcattcaaactcttttatctcccattgttaaaaaccaacacactaacccaaaccaatcacaaaaatcttaattctgtccaaactcccagctattgctccctctctcctcctctcggccttcgtctagcatgaagtatctaagctcattttgtcctcacttaactggcttctgctcattactttcgtgacgagcaccaaaaactgccatgtttacataggcaaaaaacacttgacactctatgtcttcaccactcttcagcattctccacagtaactctttcatcatttctagaaatatttcttcacttctgtgacttttctgcttacctcctggttctccaggggccctgttctcagtgtcctttgctcacttcttctaaagtgtgacaaaatattgaagagtctcaggatttagaactgggccgtcttctctttctctttcatttttttctggcttgctccagaagccttattgactctcataacatcaaataccagatagatgctgctattgactcctaattgtacatcccacctagacatccaaatgcctgcatccaataggcgtttggacacaatgacatttccaactggatgtctctcaccttctacccataccaaacctcaactcttgcttctcctgcattctcatagatacctccagccacccagtcaatacaatttgagagttactctggacttttcacctccttcacacctcatatccacagttgtcattctatttttcaaaatatgtgttaaggtcatccatttctcctctaatctactggccagcccaaactactaccatctttttcctggacaactgcaatacttaccttcatctttttcatagccttttttttttttttctctccctggccgtgagtgtattctacagagcatccaacatcatgtccctctcctcaaaaactttctttcttttttttttaattatactttaagttctgggatacatgtgcagaatgtgcaggcttgttacataggtatacatgtgccagggtggcttgctgcccccatcaacccggcatctacattaggtatttctcctaatgctatctctcccctacacacaccctccaccgctcgacaggccccgatatgtgatgttcccctccctatgtccatgtgttctcattgttcaattcccacttatgagtgagaactcgcagtgtttggttttctgttcctgtgttagtttgctgagaatgatggcttctagcttcatccatgttcctgcacttcctctctcacaatcacactttgtctgggtctccccctacttccagggtttccaacaattaccgttgtaattaatataatttaaagaaatttgtatgtaaatccttaggagaattcctgacaatgatgatataataaatccctagcagtggaataactgcatcgaaggcttttaagacattgtatagtcttgaactttgaagtcagacattgatataaatctctgctatataccttccctgtggataagttccacatccttctggatcctaaagtcctaacctatgaaatgggagagtgatatttacctcagaagaatattgaaaatattaagtgatatgatattctagctctaaccctttttagctgtgtagcttggacaaatcaataaacctctgtttgctttaaaatccttctaggtaaataagaatgagatacaactacatgcctcccagggcagctgtggggattaaacgaattcatatgtatgtaaagcacatagcacagtgcttgacatgtggcatgcactgtatcaaagttacctacaggatatctgtaaagtgtgtaacattatgcttaatgcttggtaatttctcaagaaatggatagcaattattattattattattactattattatttaatgaagtctcactctgtcgcccaggctgtagtgcagtggcgcaatctctgctcactgcaagctccgcctcccaggtttacgccattctcttgcctcagcctccccagtagctgggactacagacctccacgcccgggtaattttttttgtatttttagtggagacagggtttcaccatgttagccaggatggtctcgatttcctgacctcgtgattcacccaccttggcctcccaaagtgctgggattacaggcgtgagccacagtgcccggccaggatagcaatttttacactgcccaaaaagctgtacaaattatgcttccaccagcaagcagaatgcaagattgtgcatttcattttatctagccaacaccaaggtttacacttgaaaaaaattgcaaatttaaaaggcaaaatatatcagaatattgttttagtttgtatttatgtgattactagagagattagttttttaatatttattgaccatttctacttcttttatgatgtgcctaggtaggtccattgttttttattttttattttattttatttttttattttttgagacagggtctcactctgtcacccaggttggagtgcagtggtgcaatctcagctcactgcaaactctgcctcctgagttcaagagattttcctgccttggcctcccaagtagctgggatttcaggtgtgcatcaccacgccagggtaacttttgtatttttagtagagatggagtttcaccatgttggccaggctggtctcgaactcctgacctcaggtgatccaccagccttggcctcccaaagttctgggattacaggcatgagccactgcacccagctgcattgctaatttttctattgaatgattcacattttctcattaaagtttttctctgcatatgaagaataatatacatgtttatctcatctaatgcaactcccccagttttgtcattttttaaaaaattttgatttgcatttttgtgtagagatttaaaaaatattttatgtagttaatataacacccttaaaatgttcaatattctatgtgtgattttttaaaaatatatattccccatttagggttgattattgtttatgttagatataccatattgataacatataatgcatattcctcaaaatagtaattctaaggttaggataagaacaaatcagaaactggatgcagggaggcttttcaaattaaatcagcctctcccaagattctgaaggataccttcttgaaggcgagatcccacagattgtaaaccaatgtagggcagtactggatgttactcaaaaggcatgtcatacatggtagtgatgtatagggagaagaaaatcagaaaactgttgagcaattgttatttatttttatatatcaaatttgtcacaaactaagggaagagttaactatgttaactatgcatgcagttttgtcaatttctctgagatttttttgtttgaattttttgagtttttattacttttacacttattatttatgttttaaccttcaaagtctcattgctttaggtacagtcatgcattgctaaaggatggatatgttctgagaaatgtgtcattaggagatttcatcaccttgcaatgtgcttacataaacctagatgacatagcctactccacacctaggctagatggtgtagcctattgttcctgggctgcaaacctgcacagcatgttactctattgaatagtgtagggaactataactcaatggtaagtatttgtgtatctaaacagatcaaaacacagaaaaggtatagtaaaaacactgcatggtaatcttatgggaccaccatcctatatgttgtctgttgttgaccaaaacattatgtagcacatgaccacatggcagcaacttggctaacatcctttaattcaacattgttttcttataagtttgatgagaaaattaaaaaaaaaaaaacaatccctagcaagggccactctctgcatggaattttcacattttccccatgtttttgtgggttttctctgggtactccagtttcctctcacatcccaaaggttttccccttacatgaattgagttgtctacgtgaccccagagtgagtgagtgcaggtgtgtatgagtatgccctgtgatggtatggtggcctgtccagggctgattcctaccttgagccctgagctgccaggatgggctccagccacccacaaccctaaagtggaataagcagattggaaaataaatgaatgagtaaatagaaatcattataaaataaaaattcataaagtctatgataatcatacagatgcacagcaataaacaattcagtatgacagggctcagcaagctgcccagtctgtgattgctggggtttgaacttcatgctggtaggcggtgctccttacaatgttcacttggaaagcatttattccttgatttatataccacaccactgtcactcactgattcaccaaaacttgagtaaatcattatttcgttttgattaatcttttgtaaatgcatgtatagcacacattcatttcaatgtttaatattagtagtctatagaaatttggtgatgttttgtgaccagaaatatgccataggatcttaattcttttttacatcaattagcctgtgggaaaattgggtttgttgtatatcatttcacttaaaagtgatagtttacaaaaaattccaatgacattaagtgaagacttctatatatctctgcagttttagttttatctttcacttgagattctctgtatttaagtacgggagtcactcattcatacttgtttttataattgatataattggtcttctctctgccatcatgttttatgctttccagttttattatttcttgttttttagtgattttttcactacatttcttgccaatgtgtactatgaattctttgattttttttctttcaaggagtttgcttctctcaatgctaaattgagtcatcaaggacataggtagaaggtaatcttaaagactaagaagaactccagtattgccaggtggacttttcattgtgaagactcaggataatgaggagggaatgtgaattgagagtcaccaaagccagcttggataattatcaaagtcagagaatttcccagtaaacaaaaggaatactaggaagtgagatggaaggagctgataaagcagagagccagaaagctggatttggtggagacgttaggggtgcagagattgttttgaggcagctgttttgccagttggttgagaaaccaaggtaccaaaagagagaaaaatcggtgaagcctatataaacagttttgctattgagcagttttgctactgatcttgaaaataacccttatttagcatttctgaggtgacttttgttgagattttaatatttaagttaattttggttgttagagtcatatttaaataaaataattctgacactgaatgtacaaggcaatttcgctttattagttagcgtagggttctttaccaattaagtttaaaaaatgctaatcagaaaatgtgctgttttatttcattaattttttgttgtataataagctcttttattcttcagatttgggtctttcttcagcttggaaaatttgccattgtgtttatgatcattacttctggtgagaaatagcaattttcaatattgtatatttcttcctaggttgtcttcctcattttagtagttcagaacacggcttgtagagtcaaatcaatctaaggtcaaattccgcctatgccactttttagctgtgtgatctcagacaaatttaaaaacatatccttacattggagtttcctcattcataaattggggatgaaaaccttatttatattatggaactgctataaagattaaaatgagttatgtaaaatattttgctcagaaacaggcacatagtgagtgttcaatgaattcatagttacctttataatctctgaattacagtttctgatttctgggttattgtcccataattgtttttatttccattttctgatttttgcactgttgattctgctctttgaaacttctaagatgatttttaattcttctagttcagtctttgatatgatctgcctttttcctcatctagcttgctttgatttctgcctgcctcttgaaattctcaatttttgtcttcatctcttgtttactgcttaccttctgtctcttacttagtggattccaagttattttagatctaattaatggcatgcaactcgtgatttttaaattttacaagtttcttgaattaaatcctccccagaatatgacaatcttccataatttgagggctatatccttatccttctttcaagttacaatttttccatcagctaaatgtcctcccccaaactcaactccatagtttagttggctcatctctaatataaccttctgactgggtgtttgcatgggaaaattaaactgttttcaaatcatcttactgggcatccagttgctgttaataaaagcctttgctaagatgatgacagggttagtggggtaagtttgcattagccgcgcagccaccctacagtttcagcttctttcttcccagtgtttggtagagtaggagtgctgagagcttgctggcattttgcttccagtttaagtttgggtttgcctaggactttccttctaacagtccattgtctctgcctggtctcgttttaggtatttataaaactttggtcgtttcactgggattcttacaaggtggtagttcaaaactatagctgtatactgagtcaactggggagctttaaaaaatatactgatggctgtgtgccccacatgcaaaatgtctgattaaattggcctggaatgtggcctggacatttgtacttttaaattatctcaggtaattctgctgtacagccagcacagggaaactctatttaaaggaggagtttgtcaccagtgatcacatttaaattttatccagatattcttataactttcatttccccactgaaactcaaaaatgttaggaaataaaaaactaaatgtatataaaaaataataagctattaaaagtaaatagaaaatactagcaaaggaatatcataagatgacaaaaattaagtgtaatagttattgggaagtgggattttatgttcagacttacaaaaagcagaaggtaaaagcaaagaaaattattaaaaatgaatatcaactaagataactgaagaaaacagaatagtgaagcagaatatttaccattcatgaatttgtctatcagaggattaaatgagataaatcccagttgcaatggagagtccaagggttaacaggcccgctcaggagcaaatgggcccctttgggccacagggtctagattctgtgccctcccaaggccaaggttcagagcaaggagttctttaaggttcattccctcagccagagcctcagggtagaaaacccttcagttatcactcctgtgtatctttagatttgttgaaagggctccaattaactctgggtagcttttgctgatttttcctgcagccctgttaacatgcaaagctgcagcccagagagacaggactggcgtttcccctcaaactgaggactgctcagaaactgacttcataatttgatttgaaattatttcaagaatgaatggattcaagacttcgcacatatacgaattattttttccgtaaggtgtttaaacatgtaaacttaattatcagcataattactacagcacctggcatcaagtgttacagatataattggtgtatacaaaatattttctcaattttattgttgcattacattgagctaaagtctaggggttatattgcttcttcaggtaaaatgataaataatagtaatatttcttactatttgctatagtttggcaaatgaatcaataatgataagaataatcttccagatgactcacatatatctacatttatgtaaagaaaaagacattttaatttataacacaaataataatatagcttttgccactaaaattgtttcagtctttacatacaatggacttaatttttttacctgaatgaagtgggtttcatactgaaaatctgcctctaatttttgcctcttttacatggctactgtaataattagtgactctcaattctactggtcataaggtgattctcagattacttataaaatgcagatttgggggtcactcacacatgattctgtacatctgggctagtatttagcaatttgcattttacctaatgctccaattgtatttttggaaggtttatgaaccacatattgaaagacactagtgtagaggagtggtcagcttagactggaatactttcacctgctaggcttgcaactatccctgctttattcctgcttctggttctgactgtgttagctttgctgccagaaaaatgccaaggcaagtgaagaaagagaggcagtgtcagtaggacccctgaaccccagtaggactcctgaacttctgaaaattcccagaagaaagaaagtaagaattggggatcttgataacatggattctgattcactaggtctgggaatatggtgttagattctgcatttccaaccagccccctcccactctgtcatgccccatatagaaaggcaaggagctcactatttatatgggaaatggaaaacaacaacaacaacaacaaagaaaaaacagtaaaataaaacaaaacccaattctcaattacaagatgccccttaggttcatataaaagtgagagcagtataattcaatgtaggaattatcattgcaatgtcttggtagagccttgcctgcatgcatttaagttacaaacattcaactacatattttggaaatgggtaagggatggaggaaaaagtaaaaaagcaaaaattaaacaaaacaaaaacctataaaaatagtgtcataggcaaaggatgctatccagtatggaaaatgtcaacatctgttagctggaaagaatgtttgaataattttagggtttcccagtcattgacaaagaagtgatactcattgtttgggtgtctacaaaaagaatgaagacttcagagccctgaagaatcattgatttctgaagagttagaggcatacacaaaaccaaatgtactatactttatgggccatataaagagttgtcaagggaactttaaatcacgttatttttgccttatgcctgattttggaacttaaactcagctatgcagagtatcatcagtaagattaaattaaattaaaatgctactctatatatgtatgtatatgtgtatgttatgtacgttcatatattatataaatatgctctctctctatatatgtattctctctatatatatgtaaccatacttacctgagaagtctgcagagaaatgactgtaattcaacgccgtgaaatttttttttctattcaactgaaagttcttactccatagttgctaaaactgcctatggtactctctgtgcacccatgctatttcttcaatagacaataagctcctggaggacaagtttcatgtttcatatttattttaagcctcgttcactaccttgctcaaggtaagtgattaatatacttatcttaaaagaatgaatgaaggaatctttcaattagcaaatgtagctttctgctactaaccccatagttaacctaatgttaatatttttttgtgctgagttggactgagtattgaactactagtccttactaaagtctcctcagtcttttatcaacagttctttaattttatagaagaatgcacagagctatcacaacttaaatgtatatttggaacttaatacacatttcccaatagaaaaaaaatatgttggtagggtaagactaataaataactaataaagactaattccaaaacttagacctcagaatagaacccaaccactacatatttgaaatgaaaaataatggaagccaatactgctgcaatgctgataattataaagaacagaaaatattcatttatttaaaaaagtgatctaccacgttccatgctagtgctaggccctatcattgtaacatgatttttataacactaaaatatagcccaagcactctctctgaagtataagattatgtagacaatgaaagttttatagggaaaacctaacagagatgggtttatcatttttaattcattatttcacttgagatactgagaacctaaaataatagcgatgaagtttttctctcactggtaataggtgtccacagtaagtcaatgcagaggcgggatgttcataggcgagacccacacacttcatctttttgctgtgtcatccttatggacaaggcttctacctcatagttcaagatgactgcttgagctcctgccatccagtctgattttcacccaacaggaagaaataatggttaaagaatactcacattcactttaaagacatattttagaagttgttcctccacctctggttatcttgcgtggccagaacttagtcacatggctgtacctagcttcagggaatgttgaaaaatgctgtctttattccaagtagccacttgcccaggtaaaaagtgtttttattttactgaggaaaaggagtataatacataataaggagcaattagtaatctttgccacaataggaaatcgtcagaagtaaataaaaagtaattctttttgttggtgttattaaagataaaagccagtttttatagtagaccataaattaatattccaatatttgtagtttattacgaacttttttttttaatttgagatggaatcttgctctgttgccgaggctggagtgcattggcaccatctcagctcactgcaacctgcgccgcccgggttcaagcaattctcctgtctcagcttcccaagtagctgggactacaggtgcatgccaacacatctgttttttgttttttgttttttttgtttttgtttttgttgttggtatttttagtagagatgggatttcactatattggtcaggctgatctcaaactcctgacctcaggtgatccacctgcttcagcctcccaaagtgctggcattacaggctacaaaatatttctttaaatgtaaatcttgaaagaaactggtctgaaaaaattcacaggacgaaaatatggcctatgacataaatagtaaaaatagaaatgatgtaatgttcctgcttagctaatgtagaaagatttcattaggtaatgcagtgttgatgagttaatagctttgtctaactctcctgaatacataatgtgcctgaactactggtacattgtgaaatcttcagagagagttgttttttaaaaaaaaaagtttttcattttattttatgcaataagaattgacaccaaaggatttgcatttctttttggtaacatgttgagccgtagttaaaaatgatgaaaatatataacttttgttctacagtgataatcaactaggcatgtccacaatgcttataaacattcaatacaaatacttcaaggttatcaatcatagttgataaagaagaagaatgcacagccagacttttctgttttctaccttttatgatcattttatatttgtgttatatttggaacaaattaaaagggttatatgtataataaacaaaggtccaatattgaacccaatctctctctctcacacacacacacacacacacaaatgcacacatagaatttcttataaatcagtcatttttgtaaaggaatattacaggcatacaaacttgctcattttggaggacaagacttctaatttctgtttgtaagcaataggtgtcagtaataaatttgaacctcttaacacattttaaggtgcattttaaataagatattttatagtaaaaagtgtgctattattgtttttaattaccatttttcaacacttttttcttgtttgtggaactggagcttaggtcaaatgggaggagtaatgatcttggggtcagaatacaggttctaatattggctctactgctttttagctgtctggacttgagcaccatacagtacactcactccaaaagcagcctcctctgtacaatggaataacaatatcagaggcttgtagcaggggaccttggacactgatcataagggatgactttcatttctctttcttttcttttcctcttgtctccttgcctgtctctctgcttagtcaggtccagtgttttcttgaagagtttcagtaatttcagtgtgagacctttatgtaaggtaaagagttaacacaagcacgtggcttcaaacttattggcaaattagaataaaaatggcaaagactctgtagttcttaccacaaaggcattgattaaaaatttgaggttagaggtaaacctgctgagagaatcttaactggataatactttgaggtcaattaaaatcactgtttaaaccgtcctctaagactgggattagaccacatattttataaagaaataaagaataatgtttttcctgtttgtaagaatcaacatctgcatagtctttgataggtatatgatattctatgctctctaccaaaagttttaaacaaggtcaaaaaacccatttgaaggaaattaaatgtaagaaaaattagttttgaagtttccaagggattaccttaggtttgggttaagtgtatttattgttccaccttttgggtaaaatgcaaattgactttccctttgtaaatattagaagtccttatttttattgaaaatattatccaaaaacaacaataacaaatcccaccctcctgggctaagaaccagaggagaagcatcctggatatgtttccagatctctattagatagttaagttttcatccatatttaacaaatgtcattattcagtttcatgggatcactgtgtcaaaatgtctgtgttagaactttattttcagaggttcctttaagtggtcaggaagcatggcatattggattgattactctctttaatccatccactgggttggtttgggatgtatacttaaaaattagattttatcagcactgcagcgggatcctcagccagaagtctcttcttctgccctccttcccctagccagttttcttttaaaaagtgggctcttccattatgtctccaggtagcagtagcagctctgcctgtgtggcatcccttaccagatggccctcttaataaatgtcttgctcttgcccaccctcactttcttgatccaaatgtgaaatgccagcaaataaataagagcattgtactctgatgagttctcttgagatgggggaaaaccctggggagaggaagctagaaacagcttttctgtttgctgtgactgctcctaattactggccagtagtagaagatatcatttagatgcagtagaatataaagataaagaaaaaaaaatgagagataaattctccatgttatcccaaatgcctttgctaacgtggaaatactcttggattgttggagtgcatttgaaatattgtgcatgatccttacaaggggacccctgactttggactcagggtagacagttgctgcatgcagatttcaccgccagactaaaagtgcaacggaaatgagtgggtgatgagagcagagcagccagttctttaattgaattaaaagctgggtgacatcaatgcagacacctgtccaattacagacaggccaaggtgtttaccattgctgtacaagcgattcgaagatgacagaaatctttccgcccacagattaacataatgaaggagaacagattacagtggatgccggccaaacaccttggttggcagctgggggtggggtgggggagggaggaggagtctgctgaagtatgtaagtagaaacggagtccttttttcttctctgaaatatgctcggctttaaaaaggatccattttgctttgtgtcttaggctcggtttccaggcagagcatttatacttgtctgcatttagtcagaggagttaatcataaaatttcaacgtgaaagcagactcctctgttgttttgctgcttctcagcatacggtgtcccattagaggtgcaaaagcttgcagagctggtgtcagctccacaatgattttgtcttaggtcgtcaggctgcctccaattattaatatttttctttggctcctttgaaacttgaggttacagcaaaggaaagagagtgttggagataataatgtatcagtcaaaagaaacaatgtctgtcactttgcttgttccctggaaggggcgtggtgggagtcaggctctcctatagtgagagaaatagccgagtggagctaacagtctgcaaaatcttaattttcagtcacccgtcaagtgctaacttttggtaaaccatactaatagctgctgggatagaggataaggaaagcagtaaaaggctatgccctctgtgttcaaggaattcccaaatcactgtgaaggacttctaagttgcaagttctctaggccaatgctcttcccctctgttaagtggaaaccctgagtgcacagagtttggagccatatgcagtaggcctcttaacctatctacggtgatgagtttccttcccttaaatcaagtccctgccccctgatctttcagcttgggctttctgcacccactgtggcccacaggacttcaattcaaagggaatctacttacttgacttcaaactcccttggtgtggcatgtcaggatttctcaatgttaggcattaatgcaaaatgcattatcgcttagcagtgagagttatggtcctgctggtgccaatgattttaatccggatacccacgctcctgtgtttcatgggatactaacacttttaagacatcaataatgcttactttatgcttattgaatgtttcttcagcttgccctcttccattacctagagggactagcaggtttcctgacatgattgggaccattttctgatttcacagagtttgtggctgaaaggcagtttgcgaggtcatctggcctgccttgtaatagggacactctcaaaaaaaaaaaaaaaaaaaagacttctctgggatgtgtcccaaacaaagagattcacaaccaaaccaattttaaagttctccctttcaggatatacttcttcagtataaaaaccccaagtgtcacaagtatcataaaaggcaactaccgcattttctatttttgggctttctgtctaggattcctttagatatgtcaattctctatttcccagtattctttttaatataataccaaaatatatatttaaattaaatttaggcttcctattatcttgaactggtaagtctgaatcttataaatgtcattgtctacttggcccgtatgcaaacattcttctttatgtatcaatctgttactgtaagaattcttctagttccaatattttcttatgttagaaaccttgtaaaaatcagttgtattctatagcaccttttccagacgcatatagcggaaacattgataaatgctttttgatgatgatatatcttcagagtaacactgtattttccagagagtacctaatctaagtagaaccctgacacttaaagcaaagccattaggataaccactcaatgatctcaaaggatatatccacaatctacatagtcttggagagaatgtgttactctctttctttggccatggcacaacttttcaacttgaatccatcctggtgaacactacttactgagaatcaaaggagataaaccacgtgtctccaacaataaaatgaccttgtcttgattccaagtgaatgaagaccacatatttgaccagccccttgcccttgcataacccttaatttttaacctgacaggaggagaaagcacagtgaaccattatagtgttcttcttcctgaagtaggtaattctaactgcctttaaggaaaattatcagttggtttgacaaactttgtctctgacacacagcatgatgaacaagattccctactggaaatagaaaagaaatggcactccagccttagaaaatgcagcacattttttgaaagtgtgatttacaagccatctaaaaccttccatctttgatccaaagttggcaagaaccaaaacatcagctttcttctttttctttctttttttttttttttcctttgttttctatttttcagctctcatttctcagggcttattattgtttcaccgggcttgaaatgggaaatgtgagcactttgataaatggcttgaaagatgatctagtttctctccagcatctttctttaagagtctcagggtttttctatgaaatacaatacaatttggtaaagatctctaccaaatcaaagctgaagaagcaagtttgctgagatgagcagtgcttgcttttaaggtccttaaaataaggagtggctaaaattaataaaagactctcactatacacatgttatacacaacgtaactcctttagtgaagacaagaaacattaaataaaacactaaagatcacttagtgagttgtgaactcaggatctggtttgatacaatccctctgaaagtctatagaatacccttccttataacttgatgtaacaattaaaatttcaacatttcactctagttatgatttggaaagaaatgtcttagtataaggaattttataaagccaggctgtaaaattgtacaatcatagagctgcttttatatttctcaatgataatacttcctgaatgtacaacacatcttcatgctaatgattgcagataaccaacctgtatatcagcattgtttctttttgggcatggtgttcctatgcctcagctgaagcatgctcatctatgaagggtgctgcttttcacatatgccccataggttaagtgatgataaagggaaactagcctcatattccaacatgcttttccttattgacattaggattaaaagtcttattctctgggggctgattcatttcttgttagcatggcgttatactaattcagccatgcaagtcatcttatttagaatcttacggtagtttccaacttggcaataggaaagacatggcaaatgccaaagatttgctaaagatagaatggctaaaacacattttatgatgataactttagttttgagcctggaatttgggtatcgtggtggaggcattacaaaatggaaaaatgaagcttacataattatttagaatgttgattcttggttggggcacgttgagtatgaaataccagtgggacatccaggtgtggttacatggcctgcagatagaaacccagaaccagggcttgggagagatgtgaagtctgtagatacaaatgtgatcactgaaagataaggcttaataagctagcaaaggcgagtgtttagaaaaagaaagaagcttgacaacaacccaatcttgagaaacaaaagctatttaagagactgtgagaggaacatgagtcagtaaaggaaacaaaggagttctcggtagtttaggagaacaactaaaaagttcaatgtcacagaaggaagttgagggaggataaggactgaggaagggctatttgatttggtatttaagggatcactgctgatctttaaaagatacaaagcgtcggccggccgggcacagtggctcacgcctgtaatcccagcactttgggaggccgaggcgggtggatcacgaggtcaggagatcgagaccatcctggctaacacggtgaaaccccatctctactaaaaatacaaaaaaattagccgggcgtggtggcgggcgcctgtagtcccagctactgtggaggctgaggcaggagaatggctccaacccgggaggcagagcttgcagtgagccgagatcgcaccacagcactccagcctgggcaactgagcgagactctgtctcaaaaaaaaaaaaaaaaaagaaagaaagaaagaaagaaagaaagaaagaaagaaagaaagaaaaagatacaaattgtctagtagcatgtagaggcagaaactgagttgcaatggtagcctaaattggaatggcatagctctgcactagagctcttgactggcaatactccatgtaagtattctaaagtcctgaacttgttcagtcttaatactaaccctttgaggtaagtactatattatccccatctcacatgtgaggcctgcaaggcctttccttcaagaccgagattattattatctgtttacagactaggaaactaaggcacagaagtctgaacaacttgcccatgtacatatggccaatcggcagcagatttggcatttggagccagcaatctggcttgagcatgggtgcccatttccccactactccattatgaagatgtgcatgtgataatgttagcttgcttttaagccatttggtggaaggagaaataacttcttaaaagaaagtaaactcagaacgtaggtcatgatctgggagatttaacaggaaatgacaatcgcaggggcaggaatgagagaaagcaggaggttctgacacgagagggttttgaaattagagagagctgaatttggcatgagatggtcacacatgtgtgtatattagttcgttggcttgctgtcttctttggccatgagctaagatgacggtgccaagtggatgaatattttcatgtagaagcatggcagacaggattcagtagcccacggagatgcctgggtcgttgctggaatgaagacttagagacagccctaggaactaagggcaagtgggaggtgtcaaagcaaagaactggtctttgctccatcctggcttgttgatcttttaattctttaaattttctactggggagggaaattatggaaacatgtatattaaaatttgtgtttgaatgatgaaagctgtcatcaaaattggcaccttaaagcaataatgtattctctgagcgattgaaggtttcatcaataaagagacaccacgagtggggccatctttttataaaaatagtcataatctatgtggttaggattaaagattgctctgaaaaacgtctttgcggaaaaacagtggtgagcaaaagcacaagttatattttggattttttttaattcacaggattaactaaataaggagtctctgccttgcttatgaacactagtaaacaaaatgtgttttcatttctacacatacttttaattgctgaacaaatctcatatatctaccagcaagccatgttaattcaatacttccacgtgtaacacttccgtttaagacaggtgtcttaattaaataaactaataattttgcaagtagaagtacaaaagcataattatctaatttgctaattgttcaactatgttaatttgcatacttgttagctacaacataaacaaatggtttgtatatgtatcgcctactgttaaaataatgaagccactcttgggagtagcatttttaaagtgtgttaataggtgccctataaaaaggactccttagttaaatacggttgaaaaatgctaggttaaagaaaattaaatagttttgtttctgcaggaggtctaggatcctggaatgagataatatatatcttagctattggaaacattgtgctctgcctcacgaactatatgtggaaccccctccccattttaatgggagaaacatcagatgctgtttgagagctgttttaacaataagttggtctcacaattttttctcatgagtccttccattcaacaatcagcagaaagggaggaaaatgactgaaagaggaatatgtttttgatttctgtctctggtctctttgtttttgtctctctctcttatagacacacacacagatatacacacaatgctctttattgatgcttatggtaaacacgcaaccctcttttgtccctttttattataggcatattgacaggcttgctacccttcaaaaactatgcagtaaccctaactgcttgcactttggctggctgtactgagagctcacatgcattgaacatctctactccacaagaaggtaaagtaatttcaaaggtcttgacttccacatttcagtcatgaataataaaataggagaagagctaaatgctacaaggccatttgctggcaaaccccaacctaatttgatgacaaagtgcattgccaggccataattgctccattttttgggggggtgcgaaaatgaatcaaactccataccctttaatgacatgcatctttaatagctgtaatgcagattaatgggctttttaattgctgttacattgttcatgcaagagccttgtcattaatatgaagcatctgaaagattaatgaaagcttcctcattttactatggctcagaagtaaatctagagacagtctgactaaaaagaattgattgtatggcacagtatgaaattgagaatcaaacggttgatttccatggtcttttttaactgctaaacagcagcacaggcaacaattatttcagtatgatgaaacctccaaatgccaattgaggcattattaatcactgcttagttccttccaacttaagtctcacttctgttgtacttggaacttacaaactgttggcataaattaaggtttcagaaagcatatgttaagaaggcagtgagaaagagaaaatattttagcacgccaaagtgaaagctttgctcaagcatcagaatgcatcacttcaagaaataacagctctcaaaacatttgaagcattgttacttcatatttctctattctggataagaggaattgtacatatcttatactgtctagttgaaaagttctttaggagatttaaacgcttgatctttagggaaaaagagtcagccagtctttctctctctctctttcccagtatctatatattccccccttcctcttttaaaccctttaccaagcaccacttgcactgaagatatgtaacagaaaggaagacatggacccataggatgaaaccaggacaggataaatgactttgtaaaatccttcttgtgacccttaatatgctgtattttttacctaaaccaatcagactcccctcacctgaactatgctgtcagtgacccagcctcagcattttctccatctggtctactggtaatagcactgtttttgttgtatcattgcatctgctgaggacatgattatcatcccctcttacaaggactttgaccagcctcaatatgggacaaatggccctatgttgcattattttctccgtatccactaaatcctttgtccagggtttacctggtacccttcataccaatttcaagctaagccccagagagatccctgctcttgtttatatttccttttttatttttaaagacattcccaaacttctaaatatccacgaagtaattctgaatttactaaatgatagaggagtttaggaaaatttaaaaaaaatgtttagttcttaggaccccccaattcattgacaactatataaaatacacagctctttttaaaaaaatatgcactaaagttttcatatgtaattgactaatttggttatgcgagctctggcaattcttatcattacatataggtttttaaaaatttatattatgaaccacattcaccagcattactcatctcagatcacaagctccttgaggctaggggactctatctgcttaatttgctttaataggtacagtcccacatagagattatgggttaatagtacttttggtggagtaacacaagcatcagtcaagtgaactagtgtaagtactcctcatccatcattgacacaaattctcataaatgtgggacagttatttaacactgttcctaaagcaattactgacaagctgcccacgaatcgggaatatttccatgcatgggatttcaggtttattccatgatttattggtttgggtctgaaaagtttgaattagaaaagtaaactaaaattagactctataaatcttttcttccacagccccacaagaggttcagccaccagtagccaaatcccttcccagttctttgctgctctcctggaacccacccaaaaaggcaaatggtattataactcagtactgtttatacatggatgggaggctgatctattcaggcagtgaggagaactacacagtcacaggtaagacctctagagttatcagcgaattgttatagtctatattcaaatataaacatacatatagttggctctcgatatccaggggttccatatctgcaaatttaatcaagaatgcttaggaaatatgtgaaaaaaataacaacagaacaattaaaaataatataaattctaaaaacatagtataacaactatttacatagcatttacattgtattaggtattctaaggaatctagagatgatttaaagcatacaggaggatgtggatagcctatatgcaaataatacaccacattgtaacagggacttgagcatccatgaattttggtatcagtagagggtcctggaaccaatctctcactgatattgaggagtgactgcacacacacacacacacacacacacacacacacacacacacacaccagataaatagagtctatagttatctgaaaatgtgtttttgaaattgggttgcttatttttatctcctgttaatcactccaattgtatgatcttgaaggtcatattagattcatggtgaaactgaagctaaaaaaatatggaaaagtgctcatgttacctccctccacccagggctgtcctactgtgtgttctcttctatagagcccaccaccccttacctaaatccttctagcaattacctttgctcagatgcagaggaggcctggaaatgcacaaatgtgctaagcacaaagagctcagcacatgacttctctgacttcagcagaccacaaggattgaaattgggagccagtgttttcccagtcaggctcacagtgtccagttggatcaatgacatcatcaaataaatgcctctctcacatgagctattagagtggtgcaaaagtagttgtggtttttgccattgacagtaattacttctgtaccacacgaatactttaaaatcctcactaatgtgtaatagtcttaagactcagaagtgtgactcagtgtggtttgaattttagatcttagaggaaacatagtatatctgcccatatcatattataaagtgtgatgatactgaaattaaatgaagtaaattcttgaaaaactttctaaatacagaagacttgcattatgtatgctgcctgtactgtgtttatatttgtattatacttatagtggttttgtatttcatattattttatatactgtatgtgactctcatgtgagacattattaatcaaatgttgactgatgaaaaaaccaaggcctagagatattaacttcttcataaaggtcataacaagttagagtcagaggtaggatgaattatttatgtattcactcactcacattaatgccaggtactaaggttgtaatagggaactggccagatactgtccctcttctcttggtgctcacagcttcatgggggcacatgtagatgctggagcaagtcgtgtggacagggctgtgtattcatccagttgcattctcaggtttacatttttttggcccccctctagtctgagaaccttaaaaggacaagaacaattacttttatattttattattcataattggatagaattccataatatttattctacaacataggtattattttacaccccaattttacaagtgaagaaactgagggaaagaaggattaagtaacccaaggtcacacagcttgagtcggaggctttggtactaacccaagcattccggctgtgttgaagaatgtggtcttaaaaacaagtgttttaacttgtcttagtttctgaatttgtaaaatggtgttaattacattttccagtattttaaagagaattagaactatatataaaatataacatgtcattagcaattggtaaagagaagttataattgttatctcctgtacaacacagagttcattgtaaaaactgaataggttaatcttactccaacagtatcttatggcatgattttaactaaaaattataaaccacagaagttatttcagaaaaaattaaatcacaccatggaaggaactttacatatattacatctttgaacctttacatatattacatttttacatatattacatctttgatgtaacatattaataattaacatacaaagcacttctgtgaccaagaggtaacattgcatgtaatgggatatcataacttttagaaccagaatagacatgtcctctgagaatccttttgctccccacgtgtgacacaggtatgccccgtatgcttactgattacctttatattacatcgctgctttttgtttgtgtcatcttgaataggactgtttgtttgttcatcggtttgccctgctgaaccataatgatcattaaggacacaactatatttgtttttttcattactgcatctcttggacctatcacagagtgggaatggaataaaaagtgttagagtgaaagaatgaagtcagatgattcctgggaataaaaacaagaagatagcaaaggggaactgatggaggataggattagggtaggaataaggcaatagagaagagagaaaaatggaaaagatacagccaggggaagagaaactaagaccccttccatgcgcctaaacgaaagctgcatcagtccacagggaagtggtgcagctaatggcaggtctcaaactgtgggccttgactctttccaaaatgtacagaactccatatgaggttacactggacaaaaccggaaaaagggcagtgtagggagaggaggaagaattcacatcaatttctaataccacctgcaaaatgacactgaattctgtattttgtttgtttgaattatcaagaacgccatgtgactataggccctgaagaaagattgtggtaaatggcaccatagtgtattattacaatagaagccccaaatataaagaaagtgaaatatttttaaagtgcctacatccatggtaatagattgattcttcaatggttttctatctttatgtaatattttaaagaatatatctccaatactacccatagcatttttttttctgctgtagctttcttggcatttcataagcaactatgttccttgttgctttcatctccaaatagtttaagatatgaagcatattgggactgcaatgctggtcaaggaggggaaataaactgagaaagttaatatggggttcaaagatgcacatgattattctaactttatagctagaaaaactgagacctagatgggttaagaaactctagtcagtaatcagaggaactaattcaaatgtagatctgtctggccccaaatcctctgcttttaatttctatacattctgcttgttgctcatattttattttcccttgccagaactctaaaagaaagaccccagaacacctgtattagtctgctagggctgccatgtcaaaataacaaaactgggtgactttaatagaaaagtatttctcacagtctggaggctgaaagtccgagaccaagatgttggcaagcttgatttgtcctgagtctctttccgtggcttgcagatagtggcctcctcactgtaggtgcacatggactttctttcaggtgacttcatccttggtattttttcctcttcctctgaggatgccagtcctattggatgaggttcccactcttacgaccacagattttatatcagtgatatggactaagttcaggtcatttatatttttaaagtttagctatctacagagactctcagagaagactaaataggaaagggactctgtctgtctgaagtcagcaagggagaaggctgtggagaaactgatctagccattgggatgggctttagcttctatgggcagtttaagtctacaccataacatgtatctatctacaatgctattggtacttactgcttgtctttgtgtcagggtatttgtgacatagtatcttttccacactgagtggcttgtgggtagaacttctattcatgatgtctggtgatttcaataatagtgtcagtttaggtctactaaagtggatctgtatagagctgaaatatctcttcatagagaaaccgagaagtggaatacagagtttactagatagggaaaataattgataatatctttaattataaaagtgataaattcttacagaagataatttaaaacatgcagacaagtaatacctgagaatcctgtcatattgaaactcataatatttgatggaattccttctactactttattcatgttaacaaaattgagctataacctatgtatgatattgaatacatattcccttattatattatgactatatcctatcattaaacatttttgtaaaaatattttgaaatgttttgaataacattatattccatctcatatagcatataatggatatttattaatgcatttaaccatttgagcaatagtatctaatctatctctattttaaatatcttgacatagatattcttatacataaatctttatttgctaggttcctagaagaatagctaaatcaaaggtaatgaacatttgcagaatgtttggtatagtttgtcacattattccaggaaagttgtcagcagtgaattttatattcttaaatatttgattattttacaaaaaaaaaagttattttattttaatttgcattttaaagtactagttatagtgaatacttttctgaataattattaaccttttatattttcctttcattcatctaatcacattcttgatgagcaaaaatttaattggggtaaggaataattttgagacttctccacgagctatcctgttttttctggttacaatcacccacactgtttaaaatgttttaccctctacaatatcagaaacttccctactaacttggtttaatgtcccctcctaaatattcaaagtgtcaacaatttttttctcactcctacttcatttacttgtagtttccctttaggtttccatatagaatcgacattcttcccgtagggtttgccagtggatcttgctgccatggggggcacaagcaaagtaaatgcatttcaattcagaagccacttagcatccaggtggcttggatttttttttcttctttttcttaaatatgaagcattaaaagtcaaaggcattgctgcaccttgagttagtacaaaatttattttaaaatgcatacagttcaaattttttaccttgcataggccataagctagtagtatggtgggtcagttctgacactgaaaaatgaatccagttagagaacctcccgaaggctgttgatgtttgctataataaatagcacacactttaagtcaaactttttcattctgtattcaaaggtaatggatttttcgtaaccatagtaaccttggtgtattctggataaatacgtgaggtatatacattctagttttatttttgaatataaactaccacattatgtattactaataatatgaaaaataggatgtaggttagtataatgacagcttaaactagtatgcattttccttctgcaaaaaataaatatttatcaaaagtataggttcaattaatttttctcccagttttgtggtattctggtggtgccatttatctttttttccaagatctccattaatctcttatttctgtcccataacagatttttaagaattttgaggtaaaaacaattgtactttaaagcttatgattaaaaacataatcgaaagattgaaggacctatattgatatcactagcagagctattgtgggccacttaagatgtgtgtatacagtacattcccaaacaagtagacaaaagaaatccttcatgagactgttcaacataccaggattgtttcaaagttcaggctggacagcacctgatcgatgatgactatccagactgtagccacagattattcttattttaaacgagcaccctaccagaaactggccgtttttaagaagtttataagatgtttccaaaaagcctacaaactttttagaaacaaaaatagcaagatggtgctaatcaggacaagtctccaccaaacccggcaaggaggtttatgcgagttgtgcttcctagttagaaaatactacctgaattgcttttggttaagccaacctaagccattgctgtggataatgactagaactccaaaagaggaaaggttaatagggacattatagaaaaataacaactatctcacaccaagccataacacgtgtgttttcaaatgtatcatctgataaatctacatagtcatcttatagttaaataagagtgactgatatctagaaccatagatagtgtcttcccactgctgttccatcaggacctggatttctatcactaagactgaggcagtaagatatagataatagcaatgtaatgagtgtgtgcatgcgtgtgtgtgtgtgtgtgtgtgtgtgtgtgtgtgtgtaattgagagacagaaaaataaagagagggtagaaaggcagatgtgggcagggggaaagagggaggaaaagtggatgaattctggtaaaatcatataggcaataattatttatgtctaaccaactaaaagtgctaaaactttttttttggtcttatttgccaaggtcaaagagaactatgtgtaaatagcaaaatagaaatgctcatcttaaactttccaaacacttaagtcttacgatgggaaatttattgacgaagaagctgtattgcttatggcacaataaaaacacatttaaaggttaggcacttctatccgagcgttataaggaaccttatcagcactctacaaatttgagctaaattatactcattcacaccaatggcttacagaagctcttttcttagcaaaatagaattttactttaacctagatattttctttattttgcatatttaaatatcacattgcagtacattgaaataactcctcttacataaaaatactattacctaaaggaatgctgttaacacgcctgtgttctgttacaagctctaatattaataaagcagagcatgtgaggatttccaggtaagatgacggtctcatccatgagtcaccatgccactctattacaaacgaggtcataccatgtttccctttgatgtctcagtcatatagtattaaattgtacaaagtctgagaaactttaaggacacgaaggaacaaaagtcaagctatgcaataagtagagccttcaaagccaaattactaagctactaactctgtgaccagagactccagaatagttgttcaaggttgttctatataccagatctttgggttaatgaacagtggatgctatactctcaagagtcttattcatcgagcaacaaagggtcaaatgaaatgaaataacttgtacagaatgtttgaatatcagttgtggttagctgtaaacaatacaacctaagtgtcgttcttccattaaggtgcttctataatgcacccgtatgtgaagaaataaaatatgtttaaatttacattttaagacccgtacccaaatattatatgatctgttaacctaattaaggaatattatgttcgtaaatgatagggaaagattctatgcttaaagggattttagaagaatcatgggaataatattcagttagaaaagcaatggagttaaatgctggaaagataacggaatatgtccttcagttgaaagtgttacaaatagaggtgtcctgttattttcagcattttgagagttgctatgattttttatgtacgttttaaagtgcttaaattgagttataaattaatacagaaaagtggacacatcttaagggtacagcttgatggatatttacaaaggaaacacatctatggaatctgtacccaaaacaagaaacagaacattgtcagcaccctgtaaagctcctcattttgtggcctcaaatcttgactcaggtgattgctttcctgagtgttgacaccataaactgattttgctaattttgtactcaatataaatagaataagaaagtggagggggggtcttcaaaaagcttatggaaaatgcatattatgaaaaatgtgaggatttcaattttttccaccaaaataaactcatactaacttgttataacattcctgaaccagatctagtttgaggtggtaagaaagttaagacatcagtctgaaacaagcccctaccagggcaacatgaattcagtaaaattgaagcaaggacaaatatcaaatttctggtgaagcttgcatagaagaatagtgaaatcattgatgttttacaaaaagtttttgaggacaatgccccaaagagatcggcagtttacaagtggataactcattttccttaaaggacaaggaacaagacagtattaaagatgaagcctgcagtggcagaccatccacatcaatttagaagggaaaatattcattttgtctgtttcctaattgaggaagacaaacaattaacaaccaacatcatacacatctcaattggttcactttgtacaattctgactgaaaaattaaagttgaggacattaaacttagcaagctaacataggaacggaaaaccaaataccacatgttctcacttataagtgagagctaaatgatgagactcatggacacatagaggggaactacacatactggggcttttcagaggtggagggtagcaggagggagaggattaggaaaaaaaaaaaactaatgggtactagacttaatacctgggtgatgaaataatctgtacaccaaacccccatgacacaaggttacctatgtaacaagcctgcccttgtacccctaaacttaaaataaaagttaaaaaaaagttgagtgaactttctacttagtgggtgccaaaactgttgcacccagatcagctacagacaagagcagagctttcaatggaaattttaaacaggtggaatcaatatcctgaaacattttatcaaataattgtaataggagttgaaatatggctttaccagtacaatcctgaaaacaaagaacaatcaaagcaatggctactaagaggtggaagtggttcactcaaagcaaaagtggaccagtcaagagcaaaggtcatggcaaaagttttttggggatgcttgaggcattttgcttgttggttttctggaggaccaaaaaacaataacatctgctaatgatgacagtgttttgagaatgttagccaaagctttagcattaaaatgcccaggacagcttcactagagtccttcttcaccatgatgatgcccctgctcattcctctcattgaacatgagaaattgtatgacagttttcacggaaaatcattaggatcttacagttctgatttggttccttctgacttcttttcgtttcctaatcttaaaaaaatctttaaggagcacccatttttcttcagttaataatgtaaaaaagactgcattgacatggttaaattcccagaacagtcagttattcagagatggactaagtggctggtatcatcacttacaaaaatgtcttgaccttgattgagcttatgttgagaaacaaaggttatatttttattttttaattccattttccatgaaatttttgtagttcccttatatgttctcttttgtcactgtctttttcttagagatataggagggagagtaaatcagtacaacaattttttgtgttcctgtacctacattcagaaccctctgatctacaggcaattgctaagatgttgttagttgttaaattcctgtcttccagaaagccattggaaaatttgcaaactgaaacatctacctctttctccaagttcagatctagaaaataattatagaaatgcttcatctgtgcaattagaatttagcacatgaagtcactgacccgtgtacactagcaacaaacaaaccatataaaccattctgagtttccaacaatgtaatgttgtgtgaccataaagtttatgatgctgtagaaaaatatttaatttggaaagataataacaacaaatattttacacatatttgagtctaattcgttaaaatatatgtgtatatacatagatacatatacatggatgtgtacatatacatatataggtatgtccccatatggacatataccaaaatactaatagtgattatctcttaataatgggagtctggtattgcttttttttcttttccttgagagtcgttcaatcttttaaattctctacagtttggatattagaagtcagattctttttgtaatgttattcccaattttaatatatgtgataaaattgatagaaaggaaagaaatttcgggaacctgactacacttaaccattaatacttatctctagttttccctagtcttcaccttatatttaatcaggttgatcgtcttactaatttccttctagccaataccatagatgacctctagcactatctaccaccatcaaaacgttatgtatatttgatgatctacctcaattcccacatcttcatttgactcatagactcttccatatcaaattcctacacatttgtcatttggacacattctatcttgcaatattgacttattttcaaaggagtaaatcttgattaaaaataagaatgtaagtgcattggttacagttattatgccattatttattttcaaaatttctgtaatatctcacataggaataaggacccaactggcatccaacaaactcactgaattgagtttaaatgaattaagttgaaaaaacactgagactcagtaaattaatattttagagaaaataacaataaataccaatgcataatttggatataattaacatgctaaacttggtaaacaattttattgaggtaggctttcctgtagcttaggatttttcatttaatcatccaatatatagcaaatatatacaaatatttgttgctcaattatgtgttttagcttgctaagactattgtaacaaagtaacacaaactagatggcttaaacaacagaaattgactgtctcacacttctagagacagggagtcccagatcaagatattggcaagactggtttcttctgaaggctatgaggaggaatctgtttcatccctctctccttgttttggttgtttgctggcgatatttggcatttcttgattgtatatgaatcatcccaatctctgccatcatcttcacataatgttttccctgtgtgcttatctgtgtacaaatttctcctttttataaggacactagtcatattggatttgggcccaccttgttgagctcatctgagctaattacaactgcagttctagaggctaggacttcaacatatgaattttggggagaacacaattcaacgtgtaactctagtgctgtgcatttgatgctgtgattaataacattctaaaactttcctgaaatacctaaaacatattagagaatttaaggtgtgtgttcacaatcagttttaagatggatatggcccatgacagtaatgaaaatatttagaaaaggtgataatcaattccatctggaatgctcccagccttactttttgcatcttcacaatcacatctcttacttccctggcttgctttctttgattctttataggagtgattagtttcctagtgctgcttaatacaatacccaaaatgggatgccttaacacaatagaaatgtattctcttgaagtttgagaggctagaagtttgaaatgaaggtatcagtaggcccattgtctctctgaaaactgtaggggagaatccttccttgcctatcccgccctccagtggtttctggcagtcagtggtattctgacagtcagtggtttctggcaggtgtctgtcagtcagtggtatcctggcagtcagtggcttgcagttgcgtcaccccaatctctgcttgtatcattacatagtgttttcccttcttctaaagttctctcctcctctaaggataacagtcatattcaatttagggctccccgtctttcagtatgacctcaacttaacttcatgacatctgcaaataccttattttcaaatgaggtgacattcacatgtacagggagttaaaacatggagataccttttgggaggacaaaattcaatccactacacctccattgactccacaactactttgccactcagttgaaactgttctcacctagattgtcaatgttctggtagtctccaattcagggacagagtggaggttgtataattcatgatgttttattgatgattcctccatctcagaacattcttctcttggtgtctgtgatacctcaccttctcaattttccctattactgttcaagctctggtgtgatctcttcctcattttcttccacgcacaaatgttggtttcccccaggattcctcttgaaacattccacacaatctccctttgaaaactcagtagtccttgtcttcagatatttttcctaagccatgaacatttttctcactgcatattgggcactcctgctacaagtgtttttactccaactccttaaaactgaatttattttatctgccacatcctaccaatgtgctcttttttctgagttttttatctttgggaaaagtaacactattcattctttttcccaaacaaaaacccagcattaatctttgattactcctccttcatccttcacatccaaacttttttgctgttcttgttttaagacagggtcttcctgtgtcacccaggctggatggagtgcagtggcgcattcacagctcactgcagcctcgacctcttgggctcaaatgatcctcttgcctcccgagtagctggggccacaggtgcatgccactacacctggctaatttttgtagagatgaggtttcaccatgttgcccaggctggtcttgaactcctgagctcaagagatctgcacatccagtcttaaaatccaaactgctgttgccctattacacttatcacctggctcctatctactttcttagccttatatcattcttttattctcatttatttctacaacactacattggttttctatttctgttggtttgttttgtgaaataccacatgccttttcctacatgcagacttttgaactttctgttcactctgactggaatttactttccccagttctttacatggctgaatcattgtcttccttgagttctcagatcttataaaaccttctctatatttgttagaataacctagatgttataagcatacacacatatacatacagagagatgatagtttttaatagtgaaaacacaataaaagtttatttcttgttcacttagcattgagtgcatacaaagtttggtccacagagtttcctttttctgcacagtcattcaggaatgcaggcagatgcagattcagattctgtcttatttaacacatgacttccaagggagctctggagttatttccattgctacagcagatgaggaagaagattgagagatcatcatggcagattgttatgggccaggcctgggagtgaaggtattaaagcaataccttgtactaactcaaagttctgtaaatcagaaatttgggtggatttaattgggttcgtaattagggctttacaaggccaaaatcaagagttggggcagtttgggctctcatctgaaggctctgggaaataattcacttctagactcattcaggttgctggctgaattcagtttcttgcagtggtaaggccaaggtccctgtttccatgttgcctgtcagtcatgagctgctatcagcttctaggggccacctcaggtcctttcacatggctccctccatctcaatgatggaggatatccagtccccctcatgcttcaaatctctctgacttttgcctccagctggagaaaacactctgctttaaattgctcgtagttagtttgcacccaccaggattcatttccttttctccatataaggtaagataatcataagtgtgatatctcatgaaattcacagattccacccacactcaaagggggaaaattgtatataggtgtgtgtcactgggagtcattcttagaattcttcctaccacaggttcagaagcagaatcactcaagcatggttcttaccctgtgaccttactaagccttggtttcctggtagaatggtaacaacagtacctactttagggatttagtataaaaattaaatgtgatagtgcatataaaaagattagcataggtcccataactcttctaaaaatggtaaataatcaacaacccatgctattagtcgcagaaataaggaaattattgttatatcatcataaatattcttaatgcaaaacatcctctgcatgcaaaaaaaaagcatgtctctaaacttcatgttcaatttaactcagaaaatatttgttgagcaggtactatgtacctcagaggttagaagttatttataaaactaagatactgtcattcttcctcaaatcattcccagttcaattgcttagacagaaatacataaaactaaatagaatgctgtccaacctgtggtaaattctgtaacatgtgtgacaacaaaagagaagggttcaacccagtgtggaagataaagtgtcacagaagaatgttcacaggctttagagtcgagtttaagaactgaggaacaggcaaacataaggaccatggttgcgtagtcactagacacagaactattaatgcgcatttcacaaaaattaaagagggaagagtttaatatgagtgtgcaccctgggtaagtaatcaatagtgagaagcaaggtgggattgagattatcaaaggtgctaagttatgttgagatatttgaactttgttctgaagcaagagagaaccattgaaggattttcagaaataccacaagacaatcagtgctttagaaaacacatagttggaacatatcattgcttcaacatagcgaagactgagtctgtgtagctgttttctccatttagcaggcataaggacaagtgggttagaacactaaatgcaagaagctaattggacttaacaatacagatggcaaaaggatgaggagaggagagaaacgcattatgtttatttgttaacagctctattgtattgtatttatatgcattagtcagtgtaaaataaaatctgcttattttaaatccttttaaatagtgtttaaatatttcctgatgacacaatctgctaaagtatttacccttggtgcagatttccattaaccttgctgtagatactaagcctacaaccatatatttatagggggctcaattatggggtaaagcctagtgacatcattataaaagcacatctggataagctttagggtctttgtctttctatctgatttaggaaatttagtaaactgtaggagaataccattattaacagcccctgaattctcagattatgaggatgtcctttctctcaaaataaaggaagagagggattaaaatctctaaagctgtaaatgatatagagaaatgcccagtacacagatatcagggatattaggggaatccagttgtgttggatatacaagaagaaaaaaaaggcagaaattaaattcaaagtattctttcctcatgtcttttgtcagtttttttttattgttttttagagagtctatataaatcctttggttccctaaaggacaaaattcctttgataattttacaaattcttttctaaatagtatctctgtattgtagattaaaaaaattaatacctaggaaaggtcaggtcacttctttcagtcaaggaatgactcattcatgaaactggaaagaaaacttctttttcactcaccccaatacttgatagctatcttaaattgaatatgtctttaacagtatatttgatattatcagtgtattttgatttatatatatatatcgtatatattatatatctgtgatatatatctatatatcatttatatatctgtgatatatatctatatatcatttatatatctgtgatatatatctatatatcatttatatatctgtgatatatatctatatatcatttatatatctgtgatatatatctatatatcatatatattatatgtctgtgatatatatctatatatcatatatattatatgtctgtgatatatatctatatatcatatatatatctgtgatgtatatctatatatcatatatattatatatctgtgatgtatatctatatatcatatatattatatatctgtgatatatatctatatatcttatatattatatatctgtgatacatatctatatatcatatatattatatatctgtgatgtatatctatatatcatatataatatatgtgtgatgtagatctatatatcatatatattatatatctgttatgtatatctatatatcatatatattatatatctgttatgtatatcatatataccatatattatatatctgtgatgtatatcatatatatcatatattatatatctgtgatatatcatatataccatatattatatatctgtgatatatatcatatatatcatatattatatatctatgatatatctatatctctctctatctatctatcacattttctttaaccattctatcagtgatgggcatttaggttgattccatgtctttgctatcatgaatagtgctgtgatgaacatttcttttgatttttattgtctgtgttaggacatcataacagggccctcctaataccattaacaacgcatcatgaccctggtaatggttttgtagctgaagtctagatagtttaagtgccctatcttattcatttgtacatattcaatatatataataactactattttctggacgttaagagaattgctgaaaatacagtggtaaactgcaatgaccctatatatcctggtttgtacactgttttatcttctgtttcagttaccttgcttaaatcttgtggctatatgacactaataaaagttaccaaatttgtaataaatagcatcacaaatatttcattgtgcttgagattgtttcaaaggttttgatttttctggctatacacacacatatgtaacataacataattaaaaatgtaatgaacatcactagactactagttaaacaagttatggctaataactaatatgtacacaaaatatgtggacacaatagaacaagcaaatctttatcaataggagaatatcttcaaagtgtatattgtaaagcacttgtgcagaaaagtatattctatattctgctaatgtttatttgtttggttatatgtatgtagactacatctggaggcatacatataaattcaataattgctaaattcctaggagaaaactgggtaatagtgacacaaaggtggagagagtcttaatttttatgtaaggtcttctgtacattttggctatcgtaccatgaatatatattaatgcattattcattcaaaattaagtacaatttaaaaataaaattactacaaaatggtaaattttaaatgttaaagaaaacttggaaaaatataaagaaaaattcaaattgtccacaattttatctaccagacacaatcactaattatattttggcttatgcatttaaagtctgtttttttattattaaagcacagatacaaacatataattgggaccagactgttttacaactttttaccactttataatatactaagcttattaccaaattgcttgctcagcattcttttatgtaacattttgtgtatgtgcattttaagttttttaaaattaataccacaaatgtgtttatgcattatttaaaatgatatattcttcttcctattttgtaaatgttttaatatatatgaaggatgctaaccatttgcatgcactctatatgacagttatttttttccgctttgtcttttgtatttttttactttgtttatggtggtttttaaattaagacatttttaaaacttgtagtcaattcaaatttagatatattttccagcatagtgtcttccttaaatagaaacacttagattttcttcacttcaagaatagataaatatttcctgagattttctttgataatttatactttcaaaaatattttcacatattccagcttctgtgaatatttttatttatttatttatttatttattcatttatttattgagacagggtctcactctgtcgcccaggctggtgtgtagtagaatgattttggctcactgcaaccccgcctcctgggttcaagccattctcctgccttagtctcctgagtagctgcgattacaggcatgcaccaccacacccagctaatttttgtacttttagtagagacagggtttcaccgtgttagcccggctggtctcgaactcctgacctcaagtattccgcccaccttggcttcccaaagtgctgagattacaggcatgagccactgcacccggccacttctgtgaatctttaaattacccaatgatgtgtataagggttcaaattttattcccattttctcagtgaagaaatagagattctgaaaactgatttgatatgcctgaaatcataaagttagttaatgtcatcgctaggactagaattttggtgcttacacaatgtgctgactcccaaatcgtaaatttctaccagatgtttaaagtaaaagaatgatgggaaatttcattaaactattaactatattcagtggtttcaaaatattaatacaacattgatatctttagtgcattatcaatgtattcttggagacaacatgtcaattaaattgtctcttattcaaatgttaacttcagtttttaaaatttaaagctagtctgctgattttcaataagagctgtctaatattgtgaactagtgaatttgaggagataaaagtggaaattataggtctgcagagtgtagcattgataaagagggggccatttcttccaagtcagtaaagaaaagtgatgaaacataaactggaatttttgtgattctactgttgcatgaccttataacacccctgttttaattaactacggacctgaaataataacgtatatttctaatccactcacaggaatggtaggtatattagttagctagggctgccatgacaaaatacaggctgagtggcttaaacaacaggaatgtattgtcttacagttctgggtgctagaagtccaaggcaaaggtttccataggttaggtttcctctgaggcctctctccttggcttacaaattgccgccttcttgcaatgttcttacgtggtcttttctttgtacacgcacaccctggtgtctttattcccatccaaattttctcttcttataagggcatctgtccgattgaattaaggctcatcataatggccttattttgacttaattacctctttaaagaccacatccccaaatatggttacattctgaagattagaatgtcaatttatgaattttggacggacaaaattcagcctatagcagagggtctgctttgcaatgattatgcactattactcaccaaggtagtaaaaattaagcaaacatttatatacacaagtttttgaggggataaagcctacagaatataagaacaaaatattttcaagaatgcctgtctgtggttctttcattaattcacttcttcattcatctttattgagtacgataatgaggcagggaaaatataaccatctgactatgaattgacctggtgcttgtagacatatgtggtttaacagttttccactttgtgtacccctctctcataacatgtagcatactctgctagaattattgattgattaacctcattgtctttctcactagatcatgagtactttgagggcaggaactttatctttcatctttcatcctgaagacatggatcagcatatgtgtatagtaggagaacaataaatagttttcagaatgaaggggagaattaattttttcatgaaaactagatgtcattatgtggagaatttatcagaatgccagactggtaaggatgttcagagacacagtagttgacctaagactaacctaaatctgtttgtatcacagaagtgtaccaatgcttgacatacattggataaaatgtttatttcctatttctctgtattgtttggccacatgactattgcaaagctcataagcacaaaatttgcacaaaacccctgagagatgccatccatggctacaaatacatgttttgattatattaaagtaaaaaaattgatcaattattttaaatattcaaggtagttaagtgaataaattctatgtaattacaaccacaaggttggtgcatattttagaaataaatgcttgttttactatgagaggaaaactgcgaatggcacacgacctaaacaagggcatcctgtttgcttggatgaaaattccatccccatgtttactataccttccactctcattcaaacctagaacaggagaaaaatagttcgagtttaaaaacaaatccagtagagtttaggaaagtttgtctcgtataccacacctttaaaaggctattttgcaatgacaatattcttgtattgccctctctatttttccctccctattgtatacatgagcccagcaacttctagaatatactagcacatatgaaatttttgaatatctatttcatgtagggagattagaaagtcactttctgccacttgtgtagctctattatgcaaaaatcaagaggatgcagatcataaatcccattagggtggaactctggatgtggaaaagactatatagataattttaagagatttcccctcagctgaatcattgctataaagttaagcatggtttttaaaatataaatcaaataaatggtttctataaaggcacatacctttactgtaaactgaactccaacaaacttttgagtggacatttctcaaatacagcatctattgaaaacttcctctgaaaaaacatttcataaaaattgaagcttgccttacatattttcatactatgtggttttaatgaccgttgtattccactctatcaccataaataaatatgtgactttaaaagatatgttgtaaataaaattagctcgaaaatactaacactaaccaaacattaatcacagaatttaaggagactatcagagactaattcagaaaataaaaatattgtaaaattactaccatgaaagctctaagaaaagttcatgataatttcagtgatgctaaggctacagaccaaatataaacttagaaacaaaagtatttagtctaagacaaattaaatgtgtatatattaatttattttctctgtttgatgggcatagaagcccatcaatactctgaatttatattttattaatactctcacaatttactttcatatgtgacttactatgtaatataaaaaacaaaagagcttgaaaaactgagatcagagggcaacaataaaatattaatgctaatattatcttgaatttttatctatacatatttaaatgttgttatcctcactgaaatttgttactaatcagtgaaactttagtatttacctaaattagttcttcttataagtagctcaatctccataataggagatagactataatttgtactttagcataaatattcttctaaaatcattcaccgttttatattgtaattgactgaaacaatataaagtggcttaaaatcattggtatattataaaacctatgtcagataaaacatggcatctgtgaagtttgggaattataacccagaacagtgtataattcaaaacagatacctgaaattatcttgtacacatctcgctatctgctatatctcatcacataaaatgcatagtagatgcacaaagtagctgtccaacaaatacttatggaattaataaatgaaggaatgacaaaaatgcttttcctcaatgtgctaagtcaaatacatgtttccttttataaaaatttaactatatgttttagatttagttgaaaaaatctatactggaatttacataattacataatacatattttaaagtattattcccagtatttatgaacattcattaatgagaatggcttctacattaaaagatcagttagcctctgctatttttgataatgatttaaacttgttaattcttacctgtataatgcattctcctttacaaaatgctggtatggccacttgttttatgttatcctcacaacaattgtaggtatagatgtgataaataatatactcttcctattctgtttttctttttaacaaatgagaaaactgaggcctaaagctccagtgattcactcatgtttacacaaataactctaaactggcgctcagctcttgctaattctttgtctcctcttttgttttgtttttgtttcattttgtttccctaaaccataatgccatccaatattatttaaagtttgcctgcctgcttttgcaatggttcttagctttccacaatagcaagtgcatcaaagaagaaaaaggaaatgattatatggttattaatcaaactcagatatggctagtaccacctttataagtgaaacttatataacaatctcagtttatgtcagtctcttatcccagtgtttaaagttttaaggactgagctgggaatgtgaggaggcttttgcttttcattttgtactctactagttttaatttttcactatgtgcatacatctgcaccccaacctttaaagaattagtttcctgaaaaaaaaggaaaatgcaattcatcgtacaaataaaagcataatcccttttattaatttttagctaacaaacacataataccatcctattccaggtactgtttttaaatgacttgtatctaaatgtaatgttaacgcatactttcgatgtgcataaatatagccaagcagtcctaaattcagataaattatcttccatctactgtatataattatatagtatttcctaatttttataaaatatggtttgtgtgtatgtatactgttactcaaatgaggttttgttgtttttctctcctcaaggtcaaaaacaatatctcactctatcttttgtgtcttttgttttttgatttttttttttttttttttttttgtctgctttgaacagtttttaagaggaaaagaagaaaaggtgtttgggggttacataaaaaaagggagaaagagacccaaatctcctgtctcttttatcacctacaaactgtattgattttcactttcctttcctaaatccatgctttaaagacattgtccatctaagaaacatagagtcccaaagcacaagttttgatgtagtgagcacccattgattgtaccttgaagtggatgtaggtaaacagatgacagatagatcaggtagatatatagatatagatatagatagatttatcttgaattttcctagatcccattaatctgaatgtacaaataagtctcattagttctaatatttgtatttcactgcctcattgccctcacctgctgtagatgatctctgcctccagcaaactaatcctcatgcatttctggggagtccatatgggttttctcacttgcacttaggatcaagctggacaccaattggctaagtgccacggttactccactgggcatctccatgtcccttctctggataaacaccatcatctatgggcataaggagcactgctattcttccattgctgctccaccaggtacctgagctctcccactgctgtgccaggtggaatagttttccaccaggggccaccttagatattcctcgtcaggtgagtaccaggactgctttgctaggtagagctgtcccagtcgattctaatatgcccctctgctgttatatctgtatcactgttctgtattctgctagtaccaaagctgaatgagactatgttaaaagtagtggtggaaaaatgtctttcttccttgcctccctctttcttaagtgagtcctaaaagaatactgagtagattttggtatcttaaaggtttaacaaaacagatcttctttgttttactctaaatacaaatctgagtaaactagccaaggctctcagaatgatctctctcttctgagaaccagggcaccatacctggctccgatttctctcatggtgaattcttcaaaatgttttccagtgcatgggctttcgctgggttatctcccacgttgttcacaatgttcagagatatctgagttaacagcacacccagaggtgttccctctttccatgactgtcccccacaaccccacgccaagaatgccactccccagttctaatggcagtatgctgctggtagcctggccacctgtctcagtccatttagtgttcctataaaggaatcacccaagactgggtaatttataaagaaaagaggtttaattggctcacggttctggaggctgtacaggaagcatggcagcatctgattctgaggaggcctcagggagcttttactcatggtggaaggtgaaggggagcagatatatcatgatgagagaagaagcaagagagagagagagaggaggaagtgtcaggctctttttcaacagccagttcttgtgggagctaagagtgagaactcattcactcccatgagaatgatgccaagccactcatgagggatctgaccccaagatccaaacacctcctaaaaggctcagcctcaatgttggggatcaaattgcaacatgagatttggcagggccaaacaaaccctatccaaaccatagcaccacccaatttgccagatatacccaggcagatctaaatatatcttacactcacaatcaggtcctccttttatgagataccaaagatgttccattagggttctcagacaaacagaatggagaaagagagatttattgtaaggaattggctcacatgactgtgggagctgacaaatctaaaatctgaagtctgcagggcatgttagcaggctagatatccagggaagagttagtgttgtagtcttgggaccaaaatcttcagggcacgtattagtctgttctcacgctgctaatagagacatactcaagactgggtaatttataaaaaaggaggtttaattgactcactgttccacatggctgtggaggcctcataatcatggcagaagagcaagagatgtcttacatggcagcagacaatagagaatgagaaccaagcgaaaggggaaacctcttataaaatggtcagatcttatgagacttattcactaccacgagaacagtatgggggaaactgcctccatgattcaatcatctcccaccgggtccctcccacaacacgtgggaattatgggagctacaattcaagatgagatctgggcagggacacagccaaaccacatcagggcagatgagaggtttttgttcctcatgacacaaaatgtggtgtcttttccaacaccacttcttcaattctctgacactcactaggcatgctatagttcagctcagttctgacagtaactacctggagttagagtaagactccatagatttaagagcccagtcccacaagactaccttcccttcagaggccaggcacaagtattgagtccccactttagccacaattctctccagctgagctacacagtcttgggttcccacaaccccctcttcagggttgataatttgctagaatgactcacagaactcaagaaaatgctctacttactattgcagtttattttaaaggatgcatataaacagccagatgacaaacctcctcaaattctgtttaggggcttttaggaggtttcatgacataggcatgattgatcaaatcattagccattgatgattgactcaatttccagccactccccttctcccaagcggttgctgattgagtagtgaagctgaaagttccaagcttctaatcaaggtttggtctttctggggaacagcccttattttgaagtagtctaggggccgtctgacagtcacttaattagaacaaaagatgctactatcatctttatcactcagaaaattccaaggattttaagagttctgtgccagaaacctggtacaaagaccaaatatcttcttatatcactgcaggccagcagactggaaactcccatagaatttttatcatgcagtcttgaggcagaattctttcatctttgggaaatttcaatctttgctctaaaggctttcaactgatcggatgtggccaacccatactatgtagggtaatttacttaaagtcaactatctataaataaatgttaatcacatctaaataataactttatagcaacatttagattggtgtttgatcaaacaagtggataccatagcctggccaagttgtcacacaaaagtaaccatcacagatgtattattttatttaaaatcatcagtattatatgaattaattcagaaataaaaaaggtgttgtcatagtgtgaacacttataagtgtctttcccacagaaatgtcaacagactgtgatttgaaaattgctgttttaaaagagaaaagctcatcattctacagaaatgattcaaagatagacaatccattaaatatcttataatgggccaaatactactagttgttaatttacacttgcaacatcaaacactttaccagctttttaacatgcaactgttgcatatgatgcattgtgttttttgcaagtaggtatacagcataattctaataggatatttatttacaacctaaccttacaatttaaagtctgctactccattgtgctcatcctacccgctgtcttcttatattcaaagctattaaggagtacttgctcagcatatcactccaaattaaactgcaagacattttatgatgaattaaatgggtgacgctctcccagcctttgtaactactagagcaagtatccaagaagcagacaattttatcacaaaattctgattgccaagttgtttttattaaatagacatacagtagagaatttaatcttagaaagcatctaacataaacacagatttctcgttttatagatgaataaactaagatccaatgagggcaactatttttttccaagttcatgcaggcagctaacaccagaacaaagactaaacaaagctcttctaacttctccccccatttttatcatccattgcattcattactacaaaattactacaaaattattagcctggtctttaatggtggccccaaagaatggtttttagtattacttccttcacttctttcgtatgtcctgtgctccagctaaactgaactatgttgaactaagctaaacatttctccttaagcttgtactgcattttgctacagtctttttgccaactcttcccatccagaatgtcttcactctctatctccactgctttaaaacctaagcaattttcaatttaagttctatctcctttttgaagtattgtatattcttctagccagataaaattctaggaaaatattgtcatacttgactgcataaagatttaaattgtctatatagcaaaataaaaccattattgaaatgataaaacaagtgacaaactagaacaaaatactttatagcatacttatttaataaatatctattgatagcttgctaagtaataggcactatactaggtgctatatccaagtaatgttgacttattagctttcaattagaaaaagagaaacactattagatatgggtcaattagataaacaggcacatccaaaaagaaaaaaatatgtaaatatagtcacagagataataataataataataaatgagatgctacttaacatttttcaaatgtgtaaatattttttaaaattagatttttccatattgattagaagatggagaaaagagctctttcacataatgctgctgtgaatgaaaattggcaatttatatcataatgtgccacagttttgttctgtatggtctcaatcccccctgtaaatgtgtgctctacttttctctaccttgtcctgagctttagcctctggattctctttgggttctgccaacgtaagacacaataaagagaacaacagacaggagggaatgaggccgaagtgtttattcctcaggctctgtgcttgcaagggtccccaggctctgtgcttgcaagggttcagatgggcagtagctgttcctccattgaggggaggcccttcctacagtacagctgtctttccagctggatgtggtcctcagcctaaggcagcaatggcttggtctgtgtttagccactagctgcgttcttattcttgaatgtgccccttaagcctggcccaaatcctgtaaatagtccctgacatatttctcttcaataattccatttcagtgtgccatcttctcccttgtcaggaggaccccaaatgatccctctttgactgggaaattctacttctaagagtttatgcttaaggtgtaattaagaatgtacccaataatacagtaatccatattaaatgttataatagtagtaaaaatgacactagtgaagcacaaaagagaaattaatccaaactgaaagagtttgagaaggtttcttatagggtgtggcatttgatttgtgtcttaagggtagcatgagactatgccaaaaaagaaatgtgtatgtcttgccacccaaaagagatatcttggccattgaggatagagattcattactttcttatgctatataaggcgtagtatagggctaggttgaaatagtattaaaataatatttaaggattgattataggttttcattgagaaccattctcaggtgatactttactaagctgacaatagacttagcactgcctggcaaacagcaagtagcagtcagtgatatagccatgattattactgaattaacagcatcttaatcttcactacgatatttgaaagggaacactgattcataaacctactcttttcctgccacaggtagtcaggaacttattattcttattatgtctcattattaacttctgttgcctaacaagatattatatattgtatgtcacatgaatattttcttacaaagtattaattgattcctaatcttgttaaagaatatgatagtagcaaatatccaactaattctgagagaaaaacctccagttttgcaagaaagatttagccaagttatgcaactaagtttgttcaaataataactctataaagttatctcgattatctcctctttagtttatgaatcgaaagcattgatgaagatcaaaagctaactgatgcctccctaattctatatctatccttgtgcagaggcaaagtaggggagtcagtaggatgtttgtgtgtgtgcgtgtgtgtttttgtatgtgtgtgtagatggagacagagaaccatagcaagatagagagagaacacgagaggagactgagagagaaggaaagagggaggaagggatggatggatgaaacgaggggctttctctcattttatatcataaaagtaaccaagaaaaaaatcctgggttcaatattttataattattacaaatggggtattagagatgttcaggaagccagagtagaaggcagctagctaagaatgctgtcagcctaaggagtttttcatggacgcctttttattctaaccagccacagaagaaaagagggaaatgaagaagcatcatccttcactatcacaactgacaataagggttctcccttacctcccacccccgcccccactacacacacacacacacacaaagtagtgactgaaaaccctcagcaggctgggctcccctaccacatgccacctgctgcaaatgtgttggaggcaccaggtcctcctttcttttttgccagttttcttattgcagaaaggttttactattcaacaattaggagtgtccaaggtgttaggggtcataagatacatccttgttctcaaagcgcttataacactgtaactactgatgactggtataaggatgcttacaagagaaatttattaaaagggcaactcagtagagtacaaactacgcatatgttgaagagagtcaggagatgtttcatggataatgcaaacattgaacagggttttcatgaaagggagggatgtggatttctctgataaggtggaaaacataagcacaaatggaagaatttgttgagtttagtatgtggtttgtgttcagttttaaatataagtccttatcatagcaaagcgatttcttttctttttgtttttgttttttccttttttaaattattttactttaagttctagggtacatgtgcaaaacgtgcaggtttgttacatatgtatacatgtgccatgttggtgtgatgcacttgttaactcgtcatttacattaggtatatctcctaatgctatccctcccctccccgcccaccccccagcaggccctggtgtgtgatgttccccaccctgtgtccatgtgctctcattgttcagttcccacctatgagtgagaacatgcggtgtttggttttctgtccttgcaatagtttgcccagaatgatggtttccagcttcatccatgtccctgcaaaggacatgaactcatccttttttatggctacatagtattccatggtgtatatgtaccaaattttcttaatccagtctttcattgatggacgtttgggttggttccaagtctttgctattgtgaatagtgcggcaataaacatacgtatgcatgtgtctttatagcagcatgatttataatcctttgggtatatgcccagtaatgggatagctaggtcaagtggtatttctagttctagatccagacacatgaaaaaatgctcatcatcactggccatcagagaaatgcaaatcaaaaccacaatgagataccatctcacaccagttagcatggcgatcattaaaaagtcagaaaacagaaggtgctggagaggatgtggagaaataggaatgcttttacactgttggtgggactgtaaactagttcaaccattgtggaagacagtgtggcgattcctcaaagtgatttcaactctacagatcagtttgaaagcacaggactggatctcagtgatggttaattgctcatctggccaaagaaaagcatgttgcaaggttaaggctcctatgaggaaaaggagagcaaggatgttcaggctgaataaagcccctgtttttattaattataaggtcagaatctggttctcctggaatcaaaatgctgagcaagcaattgtggagcaagggctacacaatggcagagatgaatgcaacctgatattccacatgcattctggcgcagctcattgcttttcaggcatctacgagaaacatatcaccccttaggtttgctgccgaagatgtgttctcactgaaccataacctagcagaggttctcaggttggaataccaaatagcaagatgatgtggtcagtgctacctatattgctctaaaatttttaaacatctaattgatgatttgtgggaaggttgcacagagagaagaaaggaaaaccaggaaaaagctgtgtttttaatttatgaaatattaagaagttttcggaagaagacccagacaatatgtattagatcataaagaagcaaaaaagtgctatgtaattttctgatggtagaaacaaataagaagatataaattcctcagtttacaccatgagtttaaagaaaatcatcacctacttactggttcattttgtaaattgagatcaatgaaattctctgaacaacagcatgaaatcaatcgtaaaatagcacataattcatggccagtattgtaaattatagtttgcttgacagtaatcggtaaggtttccatgcactgggatgcatttccttgtaacacgtctaaggataatgcctgtggatccatttctaatgcatattagagtgatctgtttttccctgtccacaactccctgtgtttgatcttatgcaaatgatgcaatcaagcaaatggaaaacaagatgttgttgctcaggggctcttacaaacagtggccttatgttttcagggtttccccaccctccatttacccaactcagatttgtgtacatacctgcaattgtttgaatccgttgatccatttgtgttgcccttgaagtgcctaatcacatctatagagacatattaccaaatcagttgcagttaagctaggaggagagttgtcattactttcctctttgctttaaatttcaaattggtggctttgtttatggcttcactctcaaagaatttatcagcctcacttccctgtaaccaatctttttttcatttctttttgttaactgtttttaaaaactctctcattccattcatacattttacacatgactactccttccccccacgcccaacctgatgcctcctcctcttctccatttttttccctttccctcatcatttcctcctgttttaccaagaatttcccaatcagatcaccgtgcaactttctctgccacatgtcaaattaggttctcttctctctctctctctcttttttcatgctttattattcaaagaacactagtaacatttcatcttcttatggaaatacattgagaataatccactttgggatggacagtacaggcataaaaacaacttggaactcaaaaaagctatttaatcacaatggttttctttgtattatgtttacagttttcagatttttaaaaccaaaagaaaatacccaatttctattgtagtgactttcatgtgagtccgtgtgaagagaccaccaaacaggctttgtgtgagcaataaagctatttatttcacctgggtgcaggtgggctgagtccgaaaagagagtcagcgaagggagataggggtggggctgttttataggatttgggtaggtaaaggaaaattacagtcaaaggggggttgttctctggaggccagagtgggggtcacaaggtactcagtgggggagcttttgagccaggatgagccaggagaaggaatttcacaagacaatgtcatcagttaaggcaggaacaggccattttcacttctttcgtggtggaatgtcagcagttaaggcaggaaccggccatctggatgtgtacgtgcaggtcacaggggatatgatggcttagcttgggctcagaggcctgacattcctgtcttcttatattaataagaaaaataaaatgaaatagtggtaaagtgttgggacagcgaaaattttgggggatggtatggagagataatgggcgatgtttctcagggctgcttcgagcgggattaggggcggcgtgggaacctagagtgggagagattaagctgaagggaggtcttgtggtaaggggtgatattgtggggttgttagaagaaacatttgtcatttagaattattggtgatggcctggatacagttttgtatgaattaaaaactaaatggaataagagaaggagaaaaacaggtataaaaggtctaagtattgggacgactcaggacatctgattagagagtgcctaaggagattcagcatagtcctgccagcaaagattatttatttacttcaagagttaagagtggcagtttggggatagcatgaggagatgtcagctgtgatggcttggagaaacagtgtaaactggcagtgtaaacaagagcaggacatgtatgagtagttgagaacggtgaataggagtatgactagacagaagatagtagggatgacaagtttttttggggcacagtctaagttggtctggtgtctggaatgagactggggcctaataaaaaggagcgtctatacaggagctcaaatgggctgtactttgtagcattccgaggacaggcctgacttctgagaagggaaagtggtaaaagtattgtccagtcctttttaagttggcggctgagcttggtgaggtgtgtttttaaaagacctttagtccgttctacttttcctgaagacggaggaccgtaagggatataaaggtttcactgaatactaagagcctgaaaaactgcttggctgatttggctaataaaggctggtctgttatcagactgtatagaggtgagaaggctaaactgaggaattatgtctgacagaagggaagaaatgactgcggtggccttctcagaccctgtaggaaaggcctgtacttatccagtgaaagtgtctacctagactaagaggtattttagttatctgactaggggcatgttgagtaaagctaatttgccagtcctgggtgggggcaaatccttgagcttgatgtgtagggaagggcctgaataatccctgaggagtagtagaatagcagatggaacactgagaagttatttccttgaggatagatttccatgatgtaaagaaaatgagaggttctaagaggtgggctagtggcttgtactgtagcatagcctgcctttgctggtgtgtgatgattaggcctggtggaactgccatcaataaatcaagcgtgggcgcctgtagtcccagctactggggaggctgaggcaggagaatggcgtgaacccgggaagcggagcttgcagtgagccgagattgcgccactgcagtccgcagtccggcctgggcgacagagcgagactccgtctcaaaaaaaaaaaaaaaaaaaaaaaaaatcaagcgtgatcaggctgaggaacaggaaagaaggaaatatggggaaatggggtgaatgtcaggtggatcagagagatacagtcttgggtgtcaggtgtggtatcaggaataatgtgggaggctggattgaagtccgggccaggaacaatggtaattgtgggacttaacaaagagtgagtacagctgaaggagccgtggagcagaaagtatatgcgtcaggtatgaggaagaaaatagattttggaaattatgagaaatgtagagagtaagttgagcatagtttgtgattttgagggcctctaaagtattagggctgcagcagccgctgcacggagacatgatggctaggctaaaacagtaaggtcaagttgtttggacagaaaggctacagggtgtggtcctggctcttgtgtaagaattctgaccgcactaaccatgcctatgaaggaaaggaattgttgttttgtaagggattgaggtttgggagattaatcagacacgatcagcagggagagcacatgtgtttttatgagaattatgctgagataggtaacagatgaggatgaaatttgggcttgattgaagtaatgggggctatctgtgaagctttgaagtacagcccaggtaatttgctgagcctaatgggtgtcagggtcagtccaagtgaaagcaaagagaggctgggatgacgggtgcaaaggaatagtaaagaaagcatatttgagatccagaacagaataatggattgtggagggaggtattgaggataggagagtatacgggtttggcaccatggggtggataggcaaaacaatttggttgataaggcatagatcctgaactaacttgtaaggcttgtctggttttaggacaggtaaaatgggggaattgtaaggagagtttataggctttaaaaggccatgctgtagcaggcgggtgataacaggctttaatcctttcaaagcatgctgtgaggtgggatattggcattgagaggggtaagggtgattaggttttaatgagatgttaaggggcgcatgatccgtcgccaaggagggagtagaggtatcttatacttgtgggttaaggtcgggggatacaagaggaggacgcaaaggaggctttggattgggaagaggggcagcaatgagatgtagctgtagtccaggaatagtcagggaagcagataatttagttaaagtgtctcagcctaataagggaactgggcaggtggggataactaaaaaggagtgcttaaaagagtattgtctatgttggcaccagagttggagagttttaagaggtttagaagcctggccgtcaatacctgcaacagttatggaggcaagggaaacaggcccttgaaaagaaggtgatgtggagtgagtagcctccgtattgattaagaaggggatggacttaccctccactgtgagagttacctaaagctcggcatccgtgatggtctagggggcttccaaggcgatcgggcagtgtcagtcttcagccactaagccgagaaggggtcagtcagagaaccttgggccagagttccaggggctctgggagtggctgccaggtgagctgaacagtccgatttccagtggggtccggcacagatgggacgtggcttaggaggaatcctgggctgcaggaattccctggcctggtggccagatttctggcacttgtagcaagctcctggaggaggaggttctggaggaaggcctggccgctgcagttcaggcatttggaagttcttgtgtgctggagatgtggctggggttcgtctcacagtggaggcaaggaattgcaacttttttctattattgtacaccttgaaggcgaggttaattaaatcctgttgtggggtttgagggccagaatttaatttttggagttttatttaatgtcgggagcagattgggtaataaaatgtatattgagtataagacagccttttgactttttagggtctagggctgtaaagcttctcagggttgatgccgagcgaccatgaactgggctggatttttatatttgatgaaaaacagcctaaacgctatctgatttgggataaagaaaaaggagcattaaccttgactatgcctttagctctagccacctttttaagagtaaattgctggtcaggttggggagggctagtcatggaacgaaactgtaagccggactgggtgtaaggaggggaggtgataaaaggattatagggtggaggagcggaggctgaggaagaattgggacctagcttggcctggcgaggagcagtctggggaggaggggagaggtcagatgggtctgtagaaaaggaaggttagaaagactcagccacgcttggacgcttggggttgagactgaggggacaggtgggagggaaagaaggaagatttgggacgagttgcactgggcacagagactaggaagggaccgatgtgtaaaagaatgcctagacgtcaggcacctcagaccgtttgcctattttatgacaagaattatttagatcttgcaggatgaaaaaattgaaagtgctgttttctggctatttggaactactgttgagtttgtattgtggtcaagcggtattgcagaagaaaataagacacttagattttaggtcaagtgagagttgaagaggttttaagttcttaaaaacacaggctaagggagaagaaggaatggagggtggaaggttgcccatagtgaaggaagcaagcccagagaaaagagagagtagagacacggagggaaggggttcaggggttcttaccctccagaaaagtgggaaagaggttggggcatggaaataagggattggggcacagagatataagaggtcagggtgtggaaataagggattggggtgcagagataagaggtcggggcacagaaataaggtattggggcacagagatacgaggttgggatatttgcccctcccccagaaaagtgggacttgctgctaagggtgaaggagaagaggttgggggtttcttgccccccagaaaggcagagaaggggtgaataatcagagaggcgtccctgcaatgattaaacaccaagggaaggctccttcccagtccgtgactggcgccagagttttgggtccacggatgaaacatgtctcctttgtctttaccagaaaatgaaaggaattgaaattaagagaagggagagattgaagagtggaaaggagaaagtggttgagggatagtgagaaaggttggagaagagagtaagaagaggttgcttacccaatttaaaattggtgagatgtcccttgggctggtgggtctgaggacctgaggtcgtaggtggatctttttcacagagcaaagaacaggaggacaggggattgatctcccaagggaggtcccccgatccgagtcacggcaccaaatttcatgtgcgtccatgtgaagagaccaccaaacaggctttgtgtgagcaacatggctgtttatttcacctgggtgcaagtgggctgagtccgaaaagagagtcagcgaagggagataggggtggggccgttttataggatttgggtaggtaaaggaaaattacagtcaaaggggggttgttctctggaggccagagtgggggtcacaaggtactcagtgggggagcttttgagccaggatgagccaggagaaggaatttcacaagacaatgtcatcagttaaggcaggaacaggccattttcacttctttcatggtggaatgtcagcagttaaggcaggaaccggccatctggatgtgtacgtgcaggtcacaggggatatgatggcttagcttgggctcagaggcctgacagtgacgacatagcagtcagatttcccaaaccagaaatctgacctaacaaactacttttttggtgtgaattagcttatcttaaaaacttagaaaacatttcaattgtacctaggttctgaaaatcttgtctgtgtggttatgataagcataggtgaggtgctggttgagtatgtggcattcataaatttcagtcttcaagacatatatgtatgtctctatctctgtgtacagttatgattttatttctataattcagtttaatatctgactttactcccatgcaacttagtagtaagtaaatcacagtcactttgggggtccccccacctctactaattatgtaaaagcttctggggtcttacctagttccttagcatctggagtgtggccacccaggatgctttctttctctgtgcaaagggataactattgagacaacccttccacattcagtgggtatcctcagtgcttctacatcacacttgggcaactgaaatctttacaaggttttctgtggccctgcctgaatacagacaccaaagtctttctttttgctctggtcttgcccccgacctgggactctaccttgaaaacaggggtcagggcccctccttcagagagcttgcacatttctacttccttttatccttattccatcaggcagggaattctgaattagggaagtggaagactccatacttcctatttctcccaacattatatctgagggaacagagtcttccttctctgttccctcagtcactctgtccagaagatttttttgtttttttttctgcctcctgaccagtcacattctgttttacagagaaatctattttatagttaaattctgattttataatttaattgagtgtactagttcgttttcatgctgctgataaagacatacccgagactgtgtaatttgtaaagaaaaagaggtttaatggacttacagttgcatgtggctggggaggcctcacaatcatggcagaaggcaaaaggcacatcttacatggtagcacacaagacagaaatgagagccaagggaaaggggaaaccccttatggaaccattagatctcatgagacgtattcactaccatgagaacagaagggggaaactgcccccatgattcaattatctcccaccgggtccctcccacaacatgtgggaattatgggaactacaattcaagatgagatttaggtggggacatagccaaaccatatcactgagaagcatttagataaaaattaaatgcagaaaacatatagggtcggtagcagggaaggacggaagaaataaaataggttagtatgacaatcagattgatctcagtacccattgaacaaatcctgagcattgtaggagtttagaagaggaagctctaagggcttcaatgtaaacccttacttggttcctcaagagaattgtccaaactatgaaaggagaagaaggaaaaacaaatcaatataatgaagagagtcacaaaggaacaacataattatggctgaaaagttccaaaagcccagttcaaactggaaaacctgaaattatactagactctttcagtgtgttcagtgacatctctcggaaacatcttagagatatgagaagtattagagacataagatgataagatttatccagaagtgggaactgggatagccatatagaagaggactggggatgtgaagaaccctatgtgacccagggagtatggctttgtaatggatgatcaaatttcattgatgagggaaatgaaactattgaaaatatctgggaataagaaggtaccaagagactggacattgtgtagcggcataggagtgattgcattgatgtgacaagtggaagaggtgggaagtaaccagtttgtggtcagagagtgcaggatttagatttagaatcttggaaatcattctgaagattatgaagtagtaggtgtaactatgctgaatgttgaataaatgaagtagaggtgaagggcattgcatttgaggaagttaaagtaaagccagattcagagatgagtcattattgaggatgttagagttgccaaaaagggattatgattgaaaagaaaactgagccaatgctgaagtcatagaggagagaagcagtgtgaccggagatgtgatgggggcatgcgttaactaggttggggcatatcttcttttaaataatggattgatattaactatggctattttttctccatctatgatataaatatatatcacaaaaaatttgaaaaatatatgtaacaaaaattaaatcctctatatgcactcactcagaaaaacattgttaacatttggtttaccactatctcctgttttgtttttattttttttattgtttctttcttttacaatgaagcactggtactttaaaattatgttttggcattcagacaggtacagctttgcctttttctcgtatttaatggtaaatctcctttgtcttacaactatagacccctacattggcccaacaattatattcattatattcttggagactttaaaacatgtttagacattactatatttctgagaaaaaaaaatggcagcctgggtagagggcatggggatatccttctggtcttgctcattcatttacaacaagtaaaattatgcgagttagtcatcacaccattcctggagatatcctgctgaacatgataaaaaatatttatctgaactcaagaagtttacattctcctgggaaggatataatatcaagatataaatgaaaaggcaatattgaacttgttttagtaattatgatatggaactaaacaaggtgatataacaagaacctggggatgatggtggccatattgttcaattatcaagaaagaccactcatagaaggatgaagctgaagcataagaaagagcaatccaagtacaaagagagagaaaatagatttcagtcagaaggagcagcacctgcaaaggcccagaagtgtgaacttgttgtgttagaagaacagaataatgtctagtctagtgtatgaaaaaaatagggagaatgttacatcaaataggatctcattgaccattattagatttcgttctaagagcagaagaagggtactacagggtgttactctgaagaatcaaaagatcactcatggtaaatggtcttgttttcttcattgggaaaattgaagtagttagaggataatgcccatagactctgctaccatctacccacctaccagtattggcacccacatagtctgcatcccctcccattactatagattgtctctgttccaagttcaactctttcacttttgaactagattctcctctttcacatattcaaggacaaaactccagcaatttttttctctttcatccacttcatagttttcccttcactagtgggtcatcccatcacatacaacaaatttttctctcatttaaattactttaaaaatcttctcttgattctacttaccttttatctattgctacatttatctgttctcctttaccacaaaactttttgaaaatgttcttttattcactgtttctaattcctcttctatttccttataagcccacttaagtcaggctttagtgctgacaagttcactgaaacttcaattgtgcaattactgatgactgccatattgttatacccgatggccgatttttaattctcatcttatttcacctttaactcttaaaaattacttcctttgactttcaagacaccataatctcaatgttttcctcataccttactggtcactctctgtctccttggttgatttctcctttactcattggcctcatatgttggtatcccagggttttctcttttatatctattctcactccgtttgcactcctagccatctatatgatgatgacttaccaaattatatatctcaagccatgaactcttcctgtaattccaaacttctgttcaaatatcctgacaatctcctcttggttatctaactaacatagcaaatgtctaattgacattcattatatgaattcttatcttcccctccatgccttcctcaaccaataaaatggttactttatccttccctttgctcaggtcaaaagccttggagtcaactctgggtcttctctttcatactctacctacaatgcactgggaaatcctgttagctttgcctttaaaacatattcagaatttaaccatttcttacttgattattactggcccccacttacttgatattacaaatagcctcttcagtgagatgtattcttatgctcttgctcactaccatctatacgtctggcagccaggatgatactcatgaagtccatgtttgattgcatgacagctctgttcaaaatccttagtgtcttcctaagtagaacctcttagattaaaaaccaaaattcttacaaagacctacaaggcctgcatgaactgacccctcattaaatctctaatatcatctctaacttacttcttcctaatttgttctgctccagccacctcagcctccctgctagtcctcaagagtgtcaggcatgtccctccttccacagctttgctctgcttgttccctctcttggaatggtccaacccaaaaattcccataacttttacactcatccccacttcaggtctttgctcaaaatgccaccttcccaatgaggcctctgctgactcttaactattaaaattacccagaacttctaattctccttcctctgttctgtgttttctgcagcagttttcatgtaatgcagcatgaacatcttaaactccgttacacattcactttaaagacatgctatcttctaaaatgcaacacctttcttacccataaacttcataataccttggataatctagaggcaaaccctaactagggatggaggatttgacaagctcaactaaactatttctatttcaatcctggctcactagccattctaaccctctcaagcaacatgagaggtatacttgttctaagtatactcacttcccatcctgaccgccccctgccccagtcccagttgttatagaaacggacacttcccactccatggaagaatccgggcacggataacaaatcctgaactaattgcttcaggaagctccttccatctgaggcggatattctgggtgggtttagggcttaggtgatcatagtcaccttcaacgcatgcagtttataggggaaaggtgagtggggcactctgtgataagcagacactgcgatatgtgataatatgatgatgcattcttgagatacctaagtcctaccttgagatacctaagttccagatatgcaagtctgtaccatggaaacatacgcaagcaagcatcgggcctttttgaatggagtaacttcttcaccacctacaagttgggtagctaaatccccaccccagcaaagtagaatgtaagaaagaaggaaaacctatcccactccaaagagttcactggccaaagaattttgtagcatccaatctcggttgcggctgaccaagacaatctgatatggctattatatatttcaaggtcacgtggatttggccacatggaatataatttctggctggagcatgttctttcagaaagttggatgtgttctcagttgaaacactataggttttctccaattgcactgaattacccatcaggaattcctctaagcttggtgacctccttggttttgctcctgcaacgggacttagagtcaaatccccagcttctctttttcagggaggacaaggaattcagacagatgagaacaatgagagagagaaaggtcaccagagagcgaagatgaagagaacagaggaatggcagatacaatatgttagcatataaacacattataattttggccaagattggccctgtcggtaggagtttttctttgcataaagttttctctcagtaaataatagtctactctctcggtagcatctgaggccactgctgtaatgattttttaacttcataagtttcctagaacgttggtccaaatgaaggcaccccagttatgtctcagtcgtgtacctatagtgcgactgttgctgccatctctcagcagtccctggcaatgccacactgcttcaccatcagcttcaaagtgtccttgaagtatatattctgactacattgaatgggagtgccccatctcaacttgcaaccattggattcctgtaggatagaatttgtaaagaaaacaaggtttaatcaaaagcattaagagtctcttcttgttgacaactttttgttctaaggtaaccatatttactgtaaattatttttttaatctctcttctagtgacctacatgtttaaccaattgattgtactttgcatgaaaatcaaagtgttctttccccagtttacttttgttatcagtgcaatgcaaaatctgtttgcctgaattaggttgcatttcattaatctcttcaatatgaaattgtggtggctcatggttaatgagatttaagaatctgtgttacttaaattgtgactaacttattttaaaagtatgtcagaaaataatgattgtttctagtagtgttaaagtattaatgattagtaagtcttggtacacctgactgaactttggttagattaccaagtgtaatgaagtgttcaggatatttcagaattgagttagtatattacagattagtttaatctaatacaagagaatgtggtatctattagaaagacagacaatataaaataccagggaagttcaggggagggagagattctttcagcctagggcactaccctagtctcatggtcatctttcagacctagctcgtttcattcattaattattcattcattcaaacacacatattcaaaacctacaatgtgccaggtattgtgctacatactaaggatgcaaaatgaatatattaccattcctgctcttaaggtatttagtgtatcatatagtcatgacacagtgtttttaagtgttaagctaaaagtatgtacaaagagaaagagaagaggctaatagctccatcttgtgctggggtgacagcaaggagtgttagggacatcacaaggaagaaacaggcatctgcactgcacctcgacaatttgaaggtcaaataatagtcaggtggtggacaggagaagaatggaatctgacaaacggaattacaagctcaaagtcattgttacaagctatgtattggcatttcaaaggcaactcctgttgtcttcaaatatgctttaaaataatttaaacatctcatttatttttaaacagagccattgaactaagactaaacttagcaaatgatttacctggtcacagacgttcaagaaaacagtaaaactgttaaaatgaaaaagtcaaaacaagagtttgattgacacttgtctatttaaacataaccaaagtatatttaagggatgaagcatcctatatgttattgctattgatttttatggctatttattcatattttaagccttatcttaacaattctctgagataggactatagtggaggagtgaaatctcctcaataagaagtataatgctgagtaaattcttgtttctccctatcccctagatttagcagtatttacaccccaccagtttctactaagtgcatgcacacatgtgggctgtacaaacagttcctgggtcctactgtacacagcacagctgccaccagaacacgtggattccccagttctgactgtcctggattctagaactatacacatacagtaagtagaaatgttgtctctctcacatgctggttcatgcaagaatctcagtgagttcaatcaggggaggagcttgtgacataaaattaattttattgtgattaaatgcatagaagtgattagttcagtggatctgggaacctttgattatcacttgccagcctaatttccattttgtctttatgcaatcaggctgagctacataggtacacagattccatgcaaacttcaataaacaaaaaactgaccactttcatgactgccttgaatattttatgtttggggcattatttgtaataatttggaattagaaagtatgtatatctttttgagtatagtccaggaccttcttattcccttattacctgcagttgatgtcagaaaggaagtttcacatataggcatgttctgatgatttctggtattactgattcttgtccatttcctgatacctgaggtataaggtgtactattgtgctgagctaaaatctaataggtctctcttatcaagagttaatacttgttcatatttatctcttctggactcagttttcttatctgtaaaataagagtttagactaaatgaattctgacatttattcaagccgaaaaatattatgattcagatctcattgttccatgtctaaattctcctgttggcttcattgtgcccctaagccaagccacgttacttagccaaaaagatttcccacgactcaggtgtttctcagcttaacaatttcctgtctgttctatgacttgcccttctcatttccactgctaagttgtaaccctcatctgaaatgccctctgttcttccttctacctatccaaatccaatccatctgttaagaataaaatcttatgtatctaagtagtgtgtcacttcattcaagaagtcctgcctgattttttcagcccttccagtcatcaatttcactgttttctctaattacatattaaccctgtgttggattcctggattttccaggacaattatattattccctcttttccccatatctaagttctcagaagttctgcttctgaagtttttgttctacagcttaaattcaaaataaatactcgcttatacatttttgtattgttagctaattaaaattacaggtaaccagatggcaggagccatatcacatttcctttttgcccctcagaataggcattggataactacttcagtgttttattttaaatgaatcaattttgagatttatgttttttaaaaaagtgtcacaaatccaagttcaaatgtgtcctttgaaaatcctgtatattttagttttgacttgaatgaatgataataatgtattttaccattcccaggtggaaacaaccaagaaaaataagtgggattctggaacgctatgtattatatatgtcaaaccatacacatgattttacaatttggagtgtcatctataacagtacagaacttttccaggatcatatgctacaatacgttttacctggtaataaatatctcatcaagctgggagtaagtttatttccatcactttctctgtccccattccttccacttcttctccccttcccgtggtccatcttttctttctctctcacttaaaaaaaaaaaagtcaaaatcttcatgtattgctgtttatactgaaaactctcttcccatcctaaatgtgaattctggtgatctaatacctacacatttattttatattatgcaaatgatagaataacaccctgagtcagtagattttcccaagtcaaagttgggattatcaagattttcaaaattacttgtagaacatcataattgttaagaactttttctaaagtgctaggattcataaggttatttccctgtggcatttgtattcatttaaaaaacaatgcacagtatgaaaatttagatcttatatttttaaatggaagtttaaatgaccgtcaaatattcttgattgttattacattctggtttatattatgctcctatctcagaagaacagtcacttaataaaaccccagaatcaacatagtttagaggttcccttagacaaacaatagcattttttaaatgcaaaaatagcacttttacacaaaggtcttttaaaagaccttgatattactgtggaatttatactcagtaattccttttgttttttgatgaaatataatcttttttaagtttaatagcacgtctgaaaataactgaatataaacatgagattgtccctatttgttttaaacacactcttcattttatagcaatacctatataaggatatttgctttgataaatgccatagaaaatattctgctcttgattatgaataaatttacatttatgtagacactgtgtatgcattcattttacttaacatgctcttgaatgctctaaatattataccatgagaaaataaactacactcaactattgctaactgtctgacttaacaccacaaaacaagggcaatcagacagtggttaaaaaaatactgttcaaaactgactccatgtgcctaggtgttctgcacagcagtttatgaaacagcactttggttatgtacagttttattacccattaagtaagaaatatactaacttgattttcaaatgctaacacagaaatacaaactattttcaaaataatggtagtatcaaaattaggaagagtcttaattttttggaagcaaccaaaactaaaccaaaaattgtgctcttggttgtttatcagaagtaggcaaatgacatagaacagattctcttcctagggccgtttttaggatgtgctgtgcagtcaatcaattcatatcaatctcctagattttataaatctataataccttgaaaaatacatactagtagattaggagtcctctgccctgagtattaattcagattttactacaaactgtgtgacctaaggcaaattcacttaacctcactgagttttattttcttcaagtctaaaattagaacattgaactaaatgatgtttaatgtctctgagccataaaattctatgatgctaaaaaaagtaatcccaaacactattctatggagtcaaatgctatctgtcagccgctgaatagtgttgatgcaagatgttataaagatgtgaaaatccttgccttaactcttggtagggaaataaacttgctcacattattttcaagttcactatatttattagggcagaaaataatatattttcagggaggattcaactaacagggtttttacttaactctgttaagcagtaaattaaatgaaccagaacattttaggttcatcctggttaattgagggattattgtatatttcacagtttcaatataataactggctttcaaggtcattagattagtagatcgagagcaggttctcagcaaagtggagttgcctttatagatcattttagcatgtcgactaagagctggaaaacaaaacataaagataacaaagcctttaagcagcatttggaatagaggaagctacacggggatttgaaccactatgatttaccctaggcttggagcaggtatgttacttcatgtaacgtcatttagttttcacatttgactggattataaactgctgaaacataaggactgaatctttcaaaatttgatctgcagtttcaagcacagggcctattggaaatgggaagctgagcaaacaattcctgaatgaatgatcaccaaggacatcatttcataaaggttctaagacttttgatatgaattaaataatttgcttggaaacactggaattaggaatggtgtggttccaaaacatactctttccactgcaaaaaaaaaaaaaaaaaaaaaaaaaaaaaaaaaaacataatatgttgctactctcaacaaaggctattttgaaatgtgataaaatgtgatagctcctaataaagaagacaatatgttaaaaataaaataaagaagctattaatacagacagctatcaagacaggtgttgcttgataattttcataccactgctagccatttgtaacttgatgaattctaagtattatatattcctgaaagattcctggaagtggcttcactttttaagtaattatggatcaagtggcctttttctttttcttcgtgctttaaaatatgttgcactcttaacatccccaatccctgtggacctgaaaacttactggaaaagagaatgctagttttggtccgggcacactggcttacatctgtagtctcagcactttgggaggcccaggtgggcagaccagttgaggccaggagttcaagaccagcctggccaacatggcgaaaacccatctctacttaaaatacaaagaatagccgggtgtggtgctgcaagcatataatcccagctactcgggaggctgaggtacgataatcccttgaacccgagaggcagaggttgcagtgatctgagatctgccactgcactccagcctgggcaatacagcaagactccatctcaacaacaacaaaaaaagagaatgctagttttggattgtcttaatagtcatgatttcaaaaataattgataaaattttattatttatgcattttattgtaccaaaattgaatcccttatttggccagatgttactcatcatttcaaggcagagttatgcctttatgaatttttcaaaatggctgtaactgagaaaagctataggcgatggttaaaacaacttattttaatggctctcaggctttcaaagaccttgctatttcataaaggcatttttaatcaaccccactattttgtttagtttttccagaccagaattttaatcagcattcagctgtattgaatgtagtggcctctggtgcgggcaggtcaaacaagatactgattggttcaatttcatttagatgatgtcagattagaccaattggaagcagctttaagaacatttattttcccatcaaaggaactaagataatgtcctgcttacttaggaccctctaaatgcatccaaaaagaatgtgggcaaaacaaaataaaataatttgcaggtaattctgttatttcagcagcctctttataaataatttcatttacaagaaaaatgctttcataaatgccttacattcttaagagatttctttgtcaagttactggtttatggatctcagatgacatagtagatgaaacagtccttctaaaccaaaggatgcttttacttatcctagaagacatcataaaatcctcaaagtaaattttaattcacactgtgttttaaaaatatatacttatatgttgtatagtatagaatttatttggggagagttagcaggggaaatattttagtatacaaataagaaaaaaatagtgacaagtagactatcagaattaaatcccagtgtgttacaagtttaacaataagaagctgcaacatttttcccttctaaggaaaaaaaatctgaaaaatgcaaatggatggattttttttctccctgagaagtgggaaaaatttgtctttgaccatttttcctttgataactcagctgtctcatatggcctcttttcctgccatattttctggtggacttttagcacatttgaaatgtctggggtcttcaactttttttctattttaatcgttgggcaattattttttgagctcacagtgacctgtcctaaagctttgagtcagagtttggccacatttgcaaagattccattctctagaggagtatggtttttttcttgcacagaaaggcacatgccacagctgagaattagaggaaacccacagaggttaattaggtacccaatcttaatgcaattttcatgctcaggccacaatttaacccatctgaaagttgcttaattaagctggtaagaaattatcctgaagacatgggctattgctatagtcttgtaatagcaagtgagattaatttccatgtttgttgaccataaactgttgtttatgcttataatgaagaatttgcaactagttgcaacaactttgcaaatagtagtgtactcccatatttaaaaaaaaaatctaaaaatcagtcagcttccttctgtctttggggaaaagaatatcgactactttaagaatcacaaaatcactcactcagtatcaaactgaaaaatcagagagacgcctaaagaaagagatgctttaattttttatcttagtaatatctgtcttacacaaaaatgagctaaatatctctgcttttttacattgtcttatgattttgctttattttctttttgattttggtaaaatttagtgccttttgaaagatttttaaactttgttgtatcaattgaaattgtaacttgaagagatactgaaccaagcttaagtatagttttcaaatatcattgttatataaggatataattactaatatttgctagcaaatatgggctgaaaaccccttaatgtatttatcaatttcctggagaagtgcttgtccagtaagtttaaaacattatttgcagtttattatgaaattgcacacggaagtttctgtaacattcatgttaccatttctgacattagtgatacttaattagggaacagagagttctgtgatcatgttaaatttgtcaaacatgttttaatgaagcctatctactctgacacataagtaaattatgtgatcctttaagccattaaacattcactcaaaaattgctttgtatttgttgttttatgagaaacattgttttatttaattttatttggtgttatgctataaacatattggtcacactgtagaaataaaaggcaattgtatttgctgcacatcttttcttccctagaagtcagttgttttgtcttaaagtagtcttcatcctctagtactttacttatgttatgtgtacacatgctgtgtgtgtgtgtgtgtgtgtgtgtgtgtgtttaattcactctgggaacctttgtgcaaggctaacttcagcagggctgtttatccagtcaatatatgccctacatctctaggctctgacttaagatgcttccttaattcatacattcataccatctcagttattctctaactattggggatggctatcttatgtcttaaaaagcaaattaaataaatgttaaatcttaacactgaaatgaatttattttggggaagtaaaggtagcactatataacaaaatctgaaactcttattatgaattctctttcctcaatgttcatgaaaacttttgggaccaagagtgaaatgagcatttttgcatctctgtttaggcttgcacaggtggtgggtgcacagtgagtgaggccagtgaggccctaactgacgaggacatacccgaaggcgtgccagcccccaaagcccactcatattcacctgactcctttaatgtctcctggactgagcctgaatatccgaatggtaagtgaactcttttagcctcaagttaaaaagatgattagcaaaggtaaattaatattctaaatggcagcttatatgtggtgcttaatttttaatgatcattttagcacataaaatacctaagatagtatcattgtctctagttggggagattgtggtttttaggctaacacacaattttggtggctcaaaagtgctcccttttgatagtttttgtgtactgcatctcattgtttaatatgctccaggagaggtgaagagagcaaacggggaggattcccaaagaatgccgtagtgagagtgacattgtattttcaatgactttctgtttttaaaagccattagttcttccttggcgaaggagagaggtggaaagttcatgtacatattgtgtcaaaacgcttttgatttaataagtttatcttaaaagaggccacttggaactctgtattttttaatatactatttataaatatttcaacatgctgtttttaaacaatgcatagattaaacatacatatatttatacatatttagctggaggcaagttttgtgcatttctaagcaatatatatgtttttgtacagtttagtgaattaagctagtcagttacgtttcactaaaataaaatctcattatgaagaatttgtaatagttttgggtagaaattgctttattcatttagtggaaatatctttaaggttcatataacatagtaccattgtttcacactgatggaagcttacttgacattaaatttcattcctctttgagacaaatatcaagaagacttttaatatagaaactcttttaagaaactcattactgaaaattgaaatgggctcttttagcacagccaaaaagaatgaaagaaaaaagttacagttttattagtttgtcttatgtttactatgatattaattattccagccatctcattttaattaaacttttggcaaatgcactagatatatttgaggtaatggagagaattctaataatcagagtgaattattatctctgctattgaagttattcctgtactattacaaattttccaagaaaaaataaatggatgcctatttgataccatattaagcaatcaacaatcttgttatgcttcttacttcacaaagtaccctagttcatagatgacaatgaaaatgttaatgatttatttcaattggattgctgtgaaatgctgttacatgatttgcatagtagagcacttcccttcatcccaattggttaatacaactagaactacaattgctctcagaatcttcagctgttcagggaaacattttccacattacaaagctctttgaatgttttgtgtatttgcgtatgttttgtatatttgcaagcagttttaaaatgtactcatcaagcaagaagaatttgggagattttggagatttgtattgacacttccatggtattccaaagtcttgtgtttaattagagtgggatttttagaactttaattgtggtacaatggttagacatttaaaaggcagttttattttttttaaaacgactttttttgtttttactacttctccccactttcccccaattttttagctttttgtttctcttgttgattgtctagagagggataatctgattgttggaaaacatcttgtctctccatctgtcttcgaagtccccacacctctcctcaaatacccaaagaataaagtctaaattttttagtctggtattcaggttactaccaacttgtgactcaacctgaatacacattgccttataacatatcttcctttctagccatgctggaatatttatggcttaatgttgggttggaaaacatgggtggagtcaaataggcctagagtcaaaaattgtttctgatgtatagtgactgtgttacctcaggaaattcattaacttccatggaccccaatttccttgattagaaaattgagattaacaggctgggcctggtggctcacgcctgtaatcccagcactttgggaggctgaggggggtggatcatgaggtcaggagatcgagaccatcctggctaacacagcgaaactccgtctctactaaaaatacaaaaaattagccgggcatagtggcaggtgcctgtagtcccagctactcaggagggtgaggcaggagaatggcataaacctgggaggcggagcttgcggtgagccgagatcacaccactgcactccagcctgggtgacagagtgagactccatctcaaaaaaaaaaaaaaaaaaaggaaaattaagattaacaatccctgtcatcaccctgtccttacctgtagaaatacaactcattcttctaggctaaccgtaggcctcttattccatgaaatcattctactcttccttaagtttaaagtaaactttccctcttctcttgactatgtgaactgtttctatgccttcataatggaacttcattcagcctgtgcttaaagttatttgcgtatatgtcaaacactcccaccagatgctaaggaccataaatcattaatttctctttcactccgcagagcctaacacaatgttctactttttattggtacgcaataatatttaattcatttaatgtttcttgtggaaattacctttgatcagtggcatatatactccaaagccctggctctttaatgataccaagagagatgatagaagtacttaccatccagtgtctgcaatatatttgttcaaaatgcatttgttcctaaaatatatttttctagctgtgtagattctgaggctgggtttctcttttgagaataccgatcttgcatttgaccaaagaatttttaattttcttttctggattatgcccaattcaaagttaatggtaccaggctcacatggcaatatatgctacctaatggttgctttctaatttctgaatatgctgctgaagagaaatacaattggagaataagatagacttcattcttgtgtaactaaataaaccctttcaaaagattttaaatggtatttctcaaacttatctgattcttagaacaatcttgggagcaccaattgaataagtagattctaggctccaccacagacctcctaaataatcagaatcttccactgcctcggttatcatcaaaatacccctgggtatttactacattttccaactgagacctctcacaaaatcctccccctggatttttgttacatcttaaacccagcatatccaagttgatttctcctcatggtctccatctctctgcttgctctttctcctgtattccctctctcatggatttgcaccacccagccctgccagccagtatactgggcagcagtcttcaccttaaaccttgctcacccctgactgctgtcaccacacaacccctcgactgcacttctctagtgaaggccattaatattgctcacccagatcgcttcaggagcctcctcatgccatgcaaaaaatttgcatttgttcattcaaaatatgtattttgatgacctactaggttccttcactcttatctatacagtgcatttccttgcttcttgatctcaaggatatcagagtcctcggggaaaatatccatataaatgaattctcacaaggtggggaggtgcacaaggtgccaggtacacagagaagcagctcctagtggttccctatgagatgtggacatgtcatccctctgcatcctcacgaagatgttgcaggaccagatatagacatgtgtttagtctgaaacaggtattacttgcctggttttgcacactcaggtttcaaaatcttgactctgttaatcagttatgtacctaaaggtatgtttgttcactagggatttataaacatgaacaaagacttgttgagaaaaattaaactcaatttctataatgagaactaggtatatttttatgcttgcctatatatgacaaaatatgaaaggtataaaaagttctaatataaatgtccagtccttgccaatcaaacaattggtagcctttggccagcgtggcttaggaaacattctgtccttgtcataactgattctgacttaaatgatcatctcctactcgtgaaagtctgatggtaatccttaaccaatgctttaagaaaagatcctctccccttgttatttcagttctcttccttgtctcccagcctggtcctgctccacagtgtctgtgctggaaagcttgctagttggttcagtacatacttcatgagccctgagaatttttcctaatttggtgtcttttgttcagcagtgtaccagcagctccaagaatagtgcctgagacataataattgctcagttaaaaaattgttgattaccattattaaagaaaaaaacagaaaacaacatgttctggaaaggatgtggagaaactggaacccttaaatactgttggtgggaatattaaatggtgcatctgctatgaaaagtagtgtagaggttcctcaaataattaataatagaattattagatgatgtagcaatcccacttcttgaaatatatccaaaagaattggaaacaagatgcattgcagcattattcacggtagctacgaggtgcaaacaacctaagtgtctatggacagataagtagataagcaaaatgtgatatatttacacaatggcatatcactcggccttaaaaagaaggaagtcctgtcatacaatatgctctggatgaaacttgaggagattatggtaaatgaaataagccactcacaaaaagacaaatactgcatgattgcacttacgtgagtttatctatagtagttgaatgcacagaaacagaaattagaattacggttaccaaggtctgggtggaagggggaaatggagagttgctgttcaatgggtttagagcttcagttttccaagacgaaaaagttctacaactctgttgcacaaccacgtgtatgtagataacacaatggtacacttaaaatggttaagatgcccaattttacgttgtgctttttactgtaataaaaaaaagatacagagaggatgtaataaaatgctataaactaaactagaaaaaaagattaagaacagtgttagtttaaaacaaaaaaaaattgctgattaataatcacatagagatctatgcatgaagtatgcattttttaaacaagggtgagctcatactatttgagttgttgtggaatttacttttctcacttcacaatatggtgcaaacatctttccttgcagttcagtggaacgtgacctcattctttcaaaaggcagtatgcaatcccactgaatgaaactacagcttacaagacccatctttttattgatggacatttctgtggtttttgctattacaaacaaggttacttgctattaattgcctcagtctgccaagtacagtctttaagtactgagtcattatcacttgattcacacctaaggctttgcttgccttcaaatatgtcctgcttaattctagtcccttgcttcacatacctgcaaaaatgatggtgtgacactccagctctgtttctctaatcagagtcctttgcacccacgttccctctggcaaaggtgttctttacaggctgtgatttcagacatgattttaaaaccgctgaaaagagcgacttttaggtccaaggtctataggaacccttattatgtaggaccttgacgcttcctttgtaagaccattagctatcacagagaagtagcacaaaggattactgtctaatacatttgtgacctgtattgtgtagattgcaattgcgtaattaaagttctgcttttgagagcttccaaattctcatgagccatattcctttttagaagcttaggccttagaatcctgaaatatgttttttcttcacacttcaagtctaccttgctaaaacagcatagctatctgactatgccaaacttattcgtcattatctagcataacatttacagtgacattttaaactaattagaatatgtgttttttttaaatactaactaaaaatatagaatataaaatgtttatcttttattaatagctataattccttgtaactaacctctatctttacctaagtaaatcgacctaaaatagtttctttattagactgagccccatgagggcaggaatcatatgtatctttttcactgccctagtcctggcctttggcagagtgccacggagtagaggcatcttataaagctgtcgaatgaattaatatttaccgatgatagggacaataccaaaattgtaatagtgttgatgtgagaagcatattcatatgcaatcatacaacatacacaaatgcacactgtgagcacatttgatgattatgtaatataggtgggatgatttcaaagacagcagagaggaatcttcctcttggcctgctgaaggcttaaagcacacacttagagacctagtccttttgcttaagatttcatcagcctggtaatctgtagatttcctaatgaaagacagcacatagacttgtcttgtttgtgctctgcatgtctcagtatgaaaggatatgtttttactgtggtcaggatttgttaataaccacatgggcataattaagagagaagcatgtggctgggcgtggtggctcacccctgtaatcccagcaatttgggaggtcgaggtgggcaaatcacctgagcctgggagttcaagaccagcctaggaaacatgatgaaaccctgtctctaccaaaaaaaaaaaaaaaagaaaaagaaaaaagaaaaaaaaaattagccaggcgtggtagtgtgtgcctgtagtcccagctacttgggaggctggggcatgagaatcgcttgaacgtgggaggcagggtttgcagtgaaccacaattgtgacactgcacttcagcctgggtgacagagtgagaccacgtctaaaacaaaaaagagagagagggagaagcatgagagctgggcacccattagacatggtctagcatcttcttgagaagtgaaggggacctgagaagcttatggaaatattttcctaatttagtctttcatattggcccatctttgtgagaatttatatgtgaacatatgtcaaaatggtggcaatcatgtcaaaaataatagaaacatcttagcaggttgattatttttgtagacttacacgtagtaccttgaagacaatagaacgttatttaaaaaaaacatttggctcagtgttttgagcttatatattctgtcaataatgggtggtagagaaatcaattaactataggtctcttatacacactctatacatgttgtccttcacattaagagatgatgctatagaaataagttttcataatgtatgcacatgaagatatatgtataaatacaaattaaatattctatgcatgcatagaaataaatacttgatttcctgttaacaataataacattagtaataataataatagctataatttataagaatttgccaggcactttaattcccataactagcccatgaaataggtattgttatctcacaaatgtggaaacttagatttataagtattaaacagtttaattattcaaaatcaagacagctggttaagcagaaagattgtataaatcaaagcaaggtgtgaatgacaaaaattcacggttttattcactatattatctgcctctactttttgtagaaaggcttataatgtagaatttaatctagctgtatgaaaacaaaattttgttacttttacttgttcaatgtcctgttcttagtgccaatatttaaaattcataagatctgtgttctggtttttctctggttttggagagataactgtttgatatttcatttgattttcttactttttattttaaaataactttatttttaaatggtcaaaatgtgattctattttctttcctggaaatgctcagttttaataagtgaaatggattatagaactcagcgaatcacttaggaaaactgcttgacagttttgagcaaaccttgcgtaacttttatgaaacacctccagtcagtttgtcaggtagaatttcccaagcacagtcttttttagattccgttgattccatttttaggagagcataacagtaataaggcattatcccgcaatgtgaaagctcttctctcttttcctttttaattgaaggatcaagtattcacacagggagatatctgccacattcaatcagcatctggaccttgaggggagccctcagttcatattcctattgccatgctgcactggaaaagacaaacaaatatgtttggagcatctatattcactacacatgttatttttatgacacactaaagcattgttgtttaattcttacagtaaacacaattcttcagcgtaaatagagataccttgtattaaatttacattgtattgtacttgcattgaatttccttggttatatatgacaacctattgagcaccttaggaaatacaatttgacataacatgatgaagaggcacaaagatatatatcccagtggatatgctttatggacaattatcatccagcttccctgtgaaaattaaacaccttaaaaaccctatcattatggaaacagaaaggtgataaacttgaaactccttctgttgtacagccaatgggaattaagtatccattttgtggattatccattgaagaactgaatgtctagaactagattaaattaaactgaattaagccagaacctgaccccctttgccacatggcatgttacagttttattttgcttcagctgtcttactgattattagtgccagagaataagcaagaaaaagcctgaaaaaatacaatatggtacaatataatagagtaagtgattttttatggtgaatatttctcttttgcttttctagattcactctttttcaactctgccccgtgccctgtaaggctgaaccttcctcacagtggcaatgggcttcctctctctctggcttcctgttggtttgtccatgggcagcaacggcaaaagatgagagggtgagaggagcatggagtctcagaactcattctccctggctctctttctgcatggctctggattccagggttgcattcctccagtaaaggctacatttcctatttgaagcctctttctttctccaggttcctgaatttgttctcaccctttcctctaaaaacataaagaagtttactggctcctagccaactagttaaaatggtctaggaatcttagctagtactagctgggaatgctttattgtcactggttgctttcccttaaccctgtccgcatctttgtaaataggagttccactaaaatcttttccatgccatttgagttgtcattggtttcctgttgaaaccctgactcattcctaaattttatttaatccacatttaacacggagaggtgttttttgtgtgtgtgtgtttgtttttttgatgggggggtagtgcgtgaagataaatttaaaatgactttcttcatgctaagagtggcaagaataaataagtaaatgaacaaaatttccattttcttaaactttgtttcaatacaatagacatcttaaaggccaataagaagagccaagctcaaagattctagtggcggcttgcttatctaataaacccatcatatttaatttttcaaataataatcaacttattgatatatctttgaaagcttttcacttattgttataaaatatttctttgttatcattagtgaaataatggcttatgacatcttcctcttgatgaagtagctctgagtgccaagtttagcttataggtcagtttcggccaggcgtggtggctcaagcctgtaattccagcactttgggaggctgaggcgtgtgtatcacctggggtcaggagttcatcaggagttcaagaccagcctggccaacatggcgaaaccccgtctctactaaaaatacaaaaattatctgggcatggtggcaggtgcctgtaatcccagctactctggaggctaaggcaggagaatcacttgaacctgggaggcggaggttccagtgagccgagagtgtgccattgcactccagcctgggcaacaagaacaaaactccatctcaataaataaataaataaaattaaataaaaatcaaggtcagtttctcagataagccctattacgtatcctacccagactaggttagcatccacctctcccttctctatcccatgttttccttctatccatctgatttttaaaaagtaaactttacatcctcataatacctctaatgtctgttctttcgcttagattgaaagttttgtgaaggaagtaaccatgactgttctgacaacttctgtattaccagcatgcaacacaatgtctggctcatagtagctaccccatagttactgatgagccagatgactaccagaaaccaaatctaaatccagcagacttacaaaaattattttacagtatttagtaaatacttgtttctttgcactttctggacttcattggaaaggaatgaattttaaatgaaaagatagcatacaaatataagaaactattggctaatgacagatagtgtgccacggaggaatacagacctgcctaagcttgtttttgagagatgttagtttagtttttacaagagaagtgcagcacatgacataggtcagaattggaggagatagtctaaggtgagcttcctatagcaagtaaaactttaactcatactagaagcaaggggacagttctgtgtgtgtcccttctatgtgcacagtgcttattactaaagcacattcatatatgctcacttgtttgattctcagatcaactgtcaggccaccagggcaaggaatattaccccattttgttggtcaagaaatgaaagcttagtgagttttgctatctaaccaagttttaaaggtacgtggtcatgacagaagggctgaagtggttggaggaagatccctgaaaaagaagacaattggcttggaagcttttgactttgttttgaaatagttcccagaacaggagacgcactcaagaactaatttgttgattgaatgattacttacgtaaatgtatatgcacaaaattgatacttcaaaataattggccatacaatttatcctgttctgcaacttgctttttttctctaattcacatggagtaaacatctttttatgtcaatagcatagtgctccctcatttttcctcaaagcttagtaaaatgccattgaatgaaaccacaacatttatagaggctatctggtaaatgattaatatccattccttgctacagctacatctcattaatgccagctaaccattaattataaaagatgttgacaataaggtttggtgcttggactagtagatagtcctcaaatggattctcatttatttggatttggtatactccttgaggtagtgttgcaaggagtgtttagccaatagttatatcctgaggagtcctcaaggcctgaggagaggaccctgaactagctgttaagcctcctcctctaaaacaaagtcaaacaacagggttgaaagtcaaagaatgaaagagaaaagaaagctgatgtgcctattttaatatcagacaagactttacagtgagtagtattattagttataaaaatgtagtttcataataataaacgagttactaaaattaacatttattttttatcaaaatatactataagggcccacaaagataaataataagagagatgatatttagaacacatgtaaccatcagaaaactgtatccagaatatataaaacatgcctacacatctataacaaactggagttaacatctgaaaagtcatttcacaaaagaagaaaaattaaatgtctgataaacataagaaaatgggccaacttctgtaataatccaaaagtaaaagataatacccaaacaagataccattttttacatctaatactggcaaaaatttcaaagtctgacaataaggtctttttgaggatatagaacaatgagaactcacatggactcacatgtacactagaattgacatactttcaaaaagagatgagcattgtctagtaaaattgaacatatatcaacaattcctctccaggacatttgtcctagaaaatttgtgtatgcgcttcaagacacatatacaaaaatgtgtataattacattgatgtcatagccaaagtataaaaacattctaaatatctatcaagagtagaataaataaataacatttgccctgtaggaatactacacagtaatgaaaatgagtgaagtatggctactctcaaaaacatgtatagaacacatgaatatcatgttacacaaagcaagatgaaaaaattatatatacaacataactctattaatataagttagaaaaccatgagaaacttaattatgttgttaagggatgcatttctcagtagaaaagcaaggacatggttcttcaaaagtcctcatatttatctgtgaggaagggaaagggatccaattatggacaggagatttctggggtgctggcaacattctattttttcaacgtgagtgatggttacatggccttttgcttttaaatttgtcattaaaatagaattgatattgtatatatttttatatgttatgttttattacgtgatttttaaaatgtagaaagaataggtatatggaagccgtaaagttgtatgcactgtagagtctgaatgcttcagtgccgacacatagctctaccacttcctagctgtataacactggccaagttaccaaacctctctaaaagcttttcttgtcatctatttctctcatctaaaatagaacccattccactatcaagagtttttcctgaagattaaatagtacttgattaaaacgctcaatccagtgattattgctttagcataaacttctttggactttaaagtgtttgtgtcttcttacctggcatgctcccctgcacaacagtattttttaatttaaatattttattttgagataattacagattcacaagaaattacaagagacagagattccatgtatctttaattcagtttctcccaatgtcaacatcttctaaaactataatacaatatcacaactaagattttaactctgatataatcaagacacagaacaattccatcacaagacatggtttcttcttatcctcacactgaaaaacaattccctttttaaccaggaacagaagggtaagttagtactttggaagtaggcttttatgagattaacgtcattgttcatgtttgataaaggaacactcttttctgaatagtgattttatcataccatattgcaatctaacacattccatccctaagtgtcacaagttttttttttaattaaaaagaaagtatatataactgctaaagatatttcttctgccacagactactgctgaaatgcagcattcccacatccctgcctcattcacgactacttcctatacattcaggaaaagacgtctttaataattatttttcctgtttgatatttttaaccatctcactgttactacctgcatgggcttccctactccagtctattttacatgtgattctagattattttttctgtatatgactttatcttgtcgctagtcagttcataaaaacactaatggtctcctgtgcatcataaaatcccaactccttgtagtgtcattcaaggccccaaattccctttgaagttttgttttctattagactttatcgagtgatatggtttggctctgtgtccccacccaaatctcaccttgaattgtgaaaatccccatgtgtcatgggagagaccccgtgggaagtaattgaactatggggggcatgtttttcccatgctgttctcctgatagtgaataagtctcatgagatctaatggttttataaaggggagttccctgcaaaagctgtcttacctgctgccatgtaaaacatccctttgctcctcctccaccttctgccatgattaggaggcctccctagccatgtggaactggggagtccattaaatctctttcctttataaattacccagtctcaggtatgtctttattattagcatgagaagggactaatacatccagctacaggaataacaacagattattgatctatttgggatacctttactgaaccttgcactttcttacttctaggcagtggcaaatgtcattttcctcaccagaagcatcttcctgagacataggtatttcacatattacctttcatgggagacttagcttcatcatatgacttattgaagtccccactaccgtatgtggaagacttgactgctctaaaaagcctgtaacacttctttagccagagtgattattccctgctagagggtcctgtacctactgtctactatttaattatgtcatttgtttggcataaagttgttgtggtgcttatgatccttgtttaacccttgaattgttatttaattatacctatgtttaactcttttcttacttccataaaggtagatattattcttattctgttcttacttcccaaaataccaagtatagtactttgcacttgattgactttcaatatatttatattaatctttttattaggcttatcttgattgctttgagaaccagagcatgttcaccagttcttaattcaagtgaaattcctaaaaattttagaagaggaaattagaccagaaacatataacaagagtagtgaccagagtggggtaagatggccagtttccacaactaaatttatatttgtatggccctgtaaaatgggttagcccctctaagaatccattccctcctctttacagcaatgacaacaacaattcttattttttggagttgtcagtgttaaagaaaataatgcataaaagcatgtaccctattgtctgtctcaaagtaagtgatcagaacattttaattttcttttttaagaaaggctctcactttgtcacccaggctggagtgcagtggtgcaatcatggcccactgcagcctcgacctcctgggcctgagtgattctgccacgtcagcctctcaaatagccaggaccacaggcacatgtcatcatgcccaactaactttttgcattttttgtagagacagggctttgccacattgctcaggctggtctcgaactcctagactcaagcgattcacttgccttggcttctcaaaatgctgggattataggcatgagccaccatgcttggcctgagcatattttaaattactttaaattattttgggctggtggcagtggctcatgcctgtaatctcaacactttgggagactgaggagggtggatcacaaggtcaggagttcgagactagcctggccaatacagtgaaatcccgtctctactgaaaacacaaaaattagttgggcgtgatggcgggcacctataatcccagctacttgggaggctgaggcaagggaatcgcttaattcgcctcctgggaggcggaggttgcagtgagccgagatcatgccactgtactccagcctaggctacagagatagactccatctccaaaaaaattaattaattaatttaaaaaattattttaagtattctataattttgaaaatacttacatggcatttcaaggactcaaaatcttactttccccagagctactcataaatcaaaactttgtttaaaataaatgaaaacagaggtacaacataccaaaatctctgggatgtagcaaagacagtgttaagaggaatgtttattgtgctaaatagctacctcaaaaagttagaaagatctcagtttaacaaactaacatctcacctagaagaacaaactaaactcgaagctagcaaagattttttttattactgattcaattttcgaacttgacattggtctgttaagggttttaatttcttcctgattcattctttggaagttgtttgtttctaagaattttctctgtattttctagtttgtgtacatagaggtgtttataatagtctctgaggatgtgttttgcttgtttgttgttgttgtttttggtaggaactgcctcccctaccccgccgaaaaaaaagaaaaaaaaaaaaactggaccaggtggattcacacccaaattccaccagatgtacaaggaagagttggtaatgattctactaaaactgttacaaaatatcaagaaggaaggactccttcttaacactttctatgaggccagcatctctctgatagcaaaacttgtcaaagacacaactaaaaaaggaaactacaggccaatattcctgataaacatagacacaaaagtcctcaacaaaatactagcaaaccaaattcaacagcacagcaaaaagttaattcaacacaatcaagtaggcttcattcctaggatgccaagtttggctaaacatatacaaatcaataaatgtattcataaatctccttgagttggaaatatatttaaaaacatgattcatcatataaatagaactaaaagcaaaaatcacacgatcatctcaatagatacagaaaaagctttcaataaaatccaatataccttcatgataaaagccctcaacaaagtaggcatcaaaagaacatacttcaaaataataagagctatctatgacaaacccacagccaacatcacacagagcaggtagaagctggaagcattctatctgagaacaggaacaagataagaatgcccactctcaccactcttactcaacatagttctggaagtccttgccagagcaatcaggcacaagaaagaaataaaagaaatcctactaggaaaagaagaagtaaaactatctttctttgctgatatgattttatgcctacaaaacccaaaagattccaccagaaagttcctggaactgacaaacaacatcagtaaagttttaggatactaaatcaatgtgtaaaaatgagtagcatttctatacaccaataatgttcaaactgagagccaaatcaagaatgcaatctcatttacaatagccacaaaacagtaaattcctaggcatacatccatccaagaaggtgaaagatgtctacaaggagaactagaaaacactggtaaaagaaatcgtgtatggcacaaatggaaaaatgttccatgctcatgaagtggaagaatcaataatcactaaaatggccatagtgcccaaagcaatttacagattcaatgctatttctatcaaactaccaatatcatttttcacagaattaggaaaaagctattctaaaattcatatggaacccaaaaagagcccaaaaagagccaaagcaattctacacaaaaagaacaaagctggaggcatcacattactcaacttcaaactatactataaggctacagtaaccaaaacaacatgatactggtacaaaaacagacacatagaccaatggaacagaaaagagaatctagaaatacagctgtgcacctacagctatctgatcttttacaaagtcaacaaaaataatcaatggagaaaggactgcctattttaaaaatggtgctggggtagcttgctagccttatgcagcaaaccagacccctacttttcatcatatacaaaaactagctcaagatggattaaagatttaaatataagatctcatattataagaatcctagaggaaaacttaggaaacaccattctggatgttgtccttgggaaagaacttatgaccaagtcctcaaaagcaattgcaacaaaaattgacaagataaacctaattaaactaaagagcttcagcacagcaaaataaactatcaacagagtaaacagacaaattacagagtgggagaaaatattcacaaaccatccatttgacaaaggtcaaatatccagaatctataagaaacttaaatcaacaagtaaaaaacaaataacctcattaaaaagtgggtaaaagacatgaacagacacttctcaaaagaaggcagacaaacagctaacaaacatgctcaacatcactaatcatcagagaattgcatatcaaaaccacaacgagtaccatctcacaccagtcagaatgactgctattaaaaagtcaaaaaacaacagatgctggcgaggctgcaaagaaaagggttgaatgcttatatactgttggtgggaatgtaaattagttcggccactgtggaaagcagttgaaggtttttcaaagaacttaaaacagaaccaccatttgacccagcaacccattactgggtatgtacccaaaggaaaacaaatcattctaccaaaagaaacatgcactcgtgtgttcatcacagtactagtcacaagagcaaagacatggaatcagcctaggtgcccatcaacagtgggttgaatgaaaaaatatgatacatatacactacgaaatactatacaaccacagaaaaaaccctgaaatcatgtcttttgcagcaacatctatgaagctggaggcttttgtactaagcaaattaatacaagaacaaaaaaacaaatattgcatattctcatttataagtgggagctaaacattgggtattcatggacataaagatgacaatagaccctgaggattaatggcagggaatggggagtaaggactgaaaatctaactgttgggtactatgctcactatctgggtgatgggatcattcacatcccaaacctcagcatcacacaatatacccatgtcagaaacctgcacatgaacccccgaatctaaaataaaagttggaaaaaacagctattgatacatgtcctgtgttctagttaaagaaaaaagcatcttcttaggcttcagtttaaaatgtccactacattatatttgttagtttttgttactctgtttaggaatctgaggtcaatgaagttaaaattgtcatgttaataggtgttttagacttaccgcttattaaaagtatgttttaaagctgaatcatacagtgttttatattatattgattttgtttatattgaaatcagcttaatatgatgtgtgtgtgtgtatcaatataatactagtcctacagtgtggttccacaattcatccttcagcccttcctccatatgctgtcaaatactgtttacctacaggatgccgggtaactctgtgtttgtgtgtgtgtgtgtgtgtgtgtgtgtgtgatctcacctatgttaaagttagacttcattctcatccacctctcaattagatacatcctggatactaaaaagtttttgagcagttgaattaactgtcacaaatatcacttaatttcattctcagcttatttgccatgtattcatcttagtctaagcccttctttcaataactgtctgctcttcctatatccatagttccagatgtcaaggttatctagcttctcaacatagattgctaagggttgacttactagagtcagatagacaaaaaaaaaaaaaaaaaagaagaagaagaagaagtaaatttggagaaactgtcactgagagaggatgtagaagaactcaaacaatgacacaagaattggtaaggtgcagtcactgagtgatgtttagggtaaaagctgggtaagaaccctgtatctcatcaatcactgaagcattatagaattagagaatgtagtctttggtgtccataatcaaagtttcagtcttcacaaaatgattcaattatattcattatattctgtgtgagaagacaggtaagtgtgtagaacttactagaaggatttccttcaaaagtggttaagatttttagagttcatacttaaggggatgagatttagtttcaatgaaaattaacttctataaaatatctcatttcccaatatgtcagataaatgagatattatgcacataatcctaacataaaagacattctctgttccccaattatgtaagaaaagggaactattgatttaggtactttgtatctcagttaaaaagcaggtcaaataggtagcatttcaagggtcttatggtttctttaagagattctgtaacacactatttgtacataagatttttttaggatcaactgactgcttcacagagagcctgacatgtaagaattttttggtcattgttattacctgatcatatcttttttccctttaaattttctatgtattataggtaggtggtgttttcactatgtgtctttcacttcttagctttaactcatttgtgtctttgtgtgtcaagtactacatagaattaaatcaaataccttccataggtattcataaagttaccatagatggtcacaccagaaataaagaaaaacagatactggcagccacatctttttgtgtgtttagagctataagtggtacctgagagtaaaataaaagatctttcccaaaaatttggaaataagggaaatggacttatcagaatggtaaactatacaaggttgtcttcttaaaggaaaatgaatcacagcagtggctttttaaaagtattaactcatttaacaaaaaatgctttaatcctaaatgaatgtattgtcctagatctgattggtataagagaaaacatttcagatattcaaaacagagggtattttatacaagtaggttgttctcaaggtgttgtaaagaagggctggaagaacaaaagggaaaggtggcaggtactggatggaagaaaaggatgattgacaggagctggtgcttactgctacacttgccgatttgacatttgaaccattatgggacgctgccccaaccagagctgaaatgccaacaacattccactaccgaagaggcagaaaatgcagaagagatgcttcttctgtctggaatgcttgaggctgcaggtgctttgtcccctgctgacacagcagctgtcaacaaagccctcagctcttggagctagaaactggacgttttctttcttcctgcttctgtcctcctcacagtgcctcccactggcaaaacccaatagaaggccaacaagcaagagagttggaaatgtagtttgtagtttgtaggttcagccgtacagaacaggctatagaagcgtggatgtgtagctggggcggacgtcagatgaatcaccttcttagctactcggcattcacacacacccttgtacttttcaccacctttcattaccaatagcaatcactctatgcttccaatgaacatgatactactatgctttgtacaaatgacggtgctctcacctccctcatcacattcttatctgggtgatgttaattccccttttagttcaggcacaacccatctggatattcttcaacataaaaaaactaaactataaattaatacccactaaccctatttacatgaatcaatggggaaaggaggacggaaaattggctacaatatacaaatctctgtgtcataagcagaaataaaatatgatagcatttataattcttgtttatataattagttgtgagaccatagctgatatttacaacttcttctctttgccctcagctggtagttcatttgtttgtagttcttttatttttattttttgtagagatagggtctctctatgttgcccaggctggtcttgaactttggggctcaagtggtccttctgctttggcctcccaaagtgttgggattacaggtatgagtcaccacacccggcttatttggaattttttacttaggccactggatcttcattactaagggggtctatgtccttcctgttctatcttgattgggttgctgcagattttcaatgcttatatgattggacctggtcatataaagagatgcccttttgaatgtcctgactgacaatgtgcagtaggaagccagtttctcctccaatatgataccttttctctttgcctgttataggaatgctatgaagagagggttaaaaagaagccaatgtgtaccaggtgcttagaacagtgcctgatacattatgagtcatatagaatgcattaacaaataaggtcgatttacttctggggcatatctattaagaatatcttcttttagaaagcaatacaaattataagtatgcttcacttattaatttttgatctggaacacacatgacaacagttaacaggatgcaatagaaagattctcatgctggaactgttgggttctatttctgtctctgtattaattaggtttacagtttgatattcaagggtaacatctattttatcctttggtaagagacagagtttagacaaggagaaataccagagtctgtgatttaatgattccatgaaactagaaatcacatcaagagtgcttgctttcttaagaccttctttgctattgtctagtagtcatactgaaaggcaattattatcttcccaggtgttatcacgagttatggattatatctagatggtatattaatccacaattcctcagaactcagctatcgtgcttacggatttgctccttggagtttacattccttcagagtccaagcatgcacggccaaaggttgtgctctgggcccactggtgagtatctaaatttacattctaggaatgtgttaaatgtcagatgacactgaatattaaggaagaagtaagtggcggtgactcaccctctgcacagctagcctttcaagcaggatgggagatttttctttttataaaagttcatttaagagttactaagattttatattcgacataaatttcaagactgaacataggtccagtgaagggcagagtctacattttattgaaagaaagataagttggctagtgtagtaggcaaacatgaaatttttcctaatttagtgacatattgaaggcagatgtttttctttctaatcatgggctcaacatctaagtaagtttaagattaagaagtaaaaataattgaaagtccataagtgccacaatatggcaacactgctccccaaaaagtaatcaattaaaaggttgagtttacctcatctgttaggataaaatagtttcatgtgatacagcttcataagaatggtatttaaaattacatcaatatcagcttttgatattcatatttcagaaatctatatctgaaatgtatatctatatttcattagcagttaacagcttgacaagattatgttttctattcctaatataatttttcaaacccaattaatagcacttaattatcataaactagcaggacagtcttcagtttcaaaacatcacattacactttggtgcatttttcttgattaattagattttgcttctttagatggaaatgctcattagtcttagatattttttggcaatgtttgctaatgccctatcattttagtgcatgctgtcttcactgaagagtatattatataaatattaccttggaagacagctctatgttttaatttctgcttccttatttttgatcacacctctctttttgtttcagagattggttgctttccaagcagctaacaccatccatcggcggagctgagctgtagtctttattgccattaagcattttatagcccagacccctctgatggatacttacccttaaatgcaggaatggcaataggccagcttttcttatccattcaaaaaaaaaaaaagaaaaagaaacaaaagaacacgtcacatgagattgaaatttacactttttgaaaatgtaagctgcaaatggtagttctggctacaaaattggctcagcggtgtctcctgatgttctggcaactttaaataagggggacctgcattatcaacctgcatcctgcacagacagtagctacgttaaccttaagaaatcaaatgccacaaagctctgataggaaggggggaatagaattgggttgtaaaacctagtctgccatggcttcattcattccagactcaatcctgacttacagcacagagttattttctcccttggtacttttctttatgctgtactcagtatgcaaacgcttttccctagtcaatgatccatctctaatcactgggattgaagagcaatgtctttatttagaacaagtcaactatatgctaccaagaagttaaagcccatggtcttcaactggtttgtgaaatatttttgtgcccattaagtgattccatatctgagtattctaaatagccctggatggctagcacaatcatgaaggatattacagattcagcttctttttgttgatgattcttttaatgtgtccttattgacttaagaaatctatgaatcaatcttaaaaggcagagttttctatcattaaattatgatgtgatactcaacaaaattcagtcaaacgtggcaatggtgtacaacggtttcttaagatattcatctaaatagagcccgatgctatgacattttaaataaaaaatttcattgaaacagaaaatttatcatttctatttttaaatattttgctggcagaaatcagaataaattttgaaagagttcaatttttttgttcatctaatatttcttaatgataattcttgttctttagattatccacacatgcagggaaatactattcaatgttttctatgaggaatatgcttcacagtcccaaatatgatatggttcatcctccaaattgcaaattgttcatataataaaaaatatgaatttgatggagaatttttaaaaataaaaagacatacagaagttccatattcttaccacttgaatgtagtattagctcatttttttttctaatctgaccagtttgttagctattatttatggttcagaaggagttgccctgtacctatctggaaaaaacaaaaacaaaacaaaataaacagcagcaacaacagcaacaaaaaaaacccacaatgattctcctgtggtttttttcagttcttactcaaccaaataatgtatttgactcttatggaaatttcaatatagaaaacaattgacaaagcctttgaacctaatttttagatgctaatgtgcattgtcaagttaaattcaataaattggggttttataaattttgaaataacataaaaattaacagaatgcagcaggaactttttaaatgctttccttgctttcaattgtattagagggaaacccttcacattttgtaatattctttaataaaatacaataatgttttccataagaaaatcactttgctttcttactccccacttagccaatgttacataacactagtggagtctaagattgagaattttatgactgtgtcttgtattgtaacattcattggatcgattctccagggactcttaaggatgatatgcgagactataggtcattgctatgtgatatggctaaaaagttgtcttggttccttagtgatgtcatacttatacagataaatacacctggataaatacacatgtacaaacacattcaccctttcacattttttttttttgcaaagaagcaaataagtgtgttatttaagacatctaaatcttaatggcaatatataatatagtcaagcaaacgctataggggaagtctgccttcaacctgcttaaaccccttaaatccctatacccccttaggagatatacttattctacaaagcctcagatttctcaactattacaaagagaaataatgtctactttaagagagttggtgtaaaaaattaaatataacttacacaaatttctggcgcattgcaagagttttattaagaataacagtttatggccaggcatggtggctcacacctgtaatcccagcatgttgggaggtcaaagtgggtggatcacaaggtcaggagttcgagaccagcctggccaatatgatgaaaccccatctctactaaaaatacaaaagttagctggatgtggtggcgggcgcctgcagtctcagctactccggaggctgaggcaggaaaatagcttgaacctgggaagtggggattccagtgacccgagattgtgccactgcactccagccttggagacagagtgagactccatttaaaaacaaacaaaagaattacaatgtattaaagtgtttgtatgttttattgcacatttgctctcaaatattttttctgtgtcaagagaggttcccaggccaaagccaagccaacttttacctttcccaagtgccttttccacatattccttttacagcaaggtagataaacaaaaaagtaaaatgaaaaagaaagaccaggtcagagcaaaatagtacaattgccaaattcaatgtatagtaaaaactgaagtgtttatccaaatatttaaggaaatgttacaaaacatatttattttgaattaaccaaatatttgaggattataatataattatctggaattgcccttaattcttcaacttttcaagtctcattttatttggaatgctttaaaatcattctatgtacaataatatgaactatatagataggcataataaaacaaattacattgtcataaaatattaaaatgatgaattgatatttttctggcctagtttcatcatttttgtatgtagctattaaactaaaaacgaaagagcaagtgttatagttctaaagaatcccatagcttttctctgatgaaaataaaacatgttgtgacctcatagttattaaaaattaacactttctttttcacatttattttcataattgataaggtataatcaccctaacaaataaaggttttctaattgataatatttctgcctaaggatttcatgtttgatcacctccttgggaggcaagagcttgtaccttaagaataaagttgaaattatcacatatttagtaaattgtgaaaggtcaaatatctatgagtgatgctgatgagtttgtagtgattagttaactgaatttaagctaatgattaaaagatattaaaaatttctgaactcttttctactttcttgccaactacatcttcctctgaccacttattttacttatttatctattgaaatcttcctgaccccggtacagctagggattgcattttatttcagagtctttctcttcaaataattcatcttttgctcttttctgcatagcttcattaacacaatcaatatttttttgtgattgtgccttagggatagagtccctaggatgcatgtatttcttaatgttagcatgatgccatttttacataactgatagcaacatagctcataaaaattttgcgtgtgtgtgcgtgcatgcctgtacacacatgtatgcatgcgtgtgtgtgtgtgtgtgtgtgtgtgtgtgtgtgtgtgtgacagagaagagagagagtcaagatatgtggtgtagctttttgacagaggccagaagtctaccacctaagtcaaggacttataaaaacagactgcgtgcatttcttctcttttgcaatcacataaaaattattttaaagcagtcctagaattggtctatggatatgtacagccataggcacagtcacagtgtgagcagatccacatattctggaaatcacaaatagctgccttggtcaagagctcaaattctaagctttaacagcagggggaagaaaacatgaggtgtgctttgatcctgctgacaaaatgaggtattcatacaagatgctactgtcaaaatagtttacttcacagcaaaaagagattctttgaagaaatatgctcaaagcgaagcatgtacttattttatttgcaaacaaaaataaatctttttatactcacaggtggaaaatcgaactctagaagctcctcctgaaggaacagtaaatgtgtttgtcaaaacacagggatcccggaaagcccacgtgaggtgggaagcaccttttcgccctaatggactcttaacacactcagtccttttcactgggatattctatgtagacccaggtaatttgtttttattttctaaactttaaataacattagaaaacaactcatttttatttaaaatctttcttttggctaaaatctttcttttagccacagatgttggtttctttattttcctgaaaataacctatacggataagctactgcccgacggttctcagaatgtggttcccagagcagcagcaacagccacatctgatgaacgcttagaaatgtacgttgtagagcttctgccccagcctagtgaatcagaaactctagaggctaaggtctaacagtctgtgtttaagcaaaccctttaggtgacacatgctgaagaactagtatatactcttcttcccttgctaaaaagtggttcaaacctaaaacatcgtgtatgcaaagagttgaactataattttgcagtccatcttaaacaagccatttttgtgactgttttagatttctgaactatcttagtaattctgctgtgtgttctgataaatttactgaatgtggattaggctacatggggttccttgaaagtattttcaaaaactatctgattcaataagttaggtgctatggtagcatgatgtttattttaagcaaactctaccataaaaagagcaggtatatattttaatagaaactttggatctgtattaagtgctgttgtttatcatcttccaggagtggccttactatttttgtaggaggaagtttgaacctttatttttaaatgagtagcaaatatgcaatatcgtggattcagtcagacatgttattagcatgttagtctgttgcttaggcttgaaaacgtttctttgtttctgaattttctatgagtctttgtaatacttaataacatcctccaagtgtaaaaacaggtgaagaaagaaaaaaacaggcttttctaaatttgaaaagggtggttatttgtgtactgcactggcaagcaaatgcgagtcaagtgcgtgtcagagtctaagctgatcccctcaaagattggtgtgtcccttttttatgcaatcagggctttcatgtattctgctgtaaagcacttgtaagattatgaggtgaaggagtgatgatcgatttgaaaaaagaagcaacatttaggccggacccatgacagcccagctatttccgccaaggcagctgggtgaataatgcaagagccatattccccctcgtgtttaatcttgcattgtttttgcagagaaaatttctgcttgccttctaagtcatgtcatcttcagttgtcatcccgtctctcaaaccatcaaaacggtattaaatgttgcaaagctgcgcggcaagagaactttcaaaagtcagaacccatttaccgaacagcccttgtagaaaatgtattctgttctcggcagaattttccttcagttctttccactgagaagtttactgatttctcccagtggaatctgctggaatttatcggttcatggttggcagtcacagattaaggtaaatgtcgatccgtaatgaccctctacatgttagtattgcagtaaagctgggcttttatgtcaaagatatcggagagggagctattacacatgacaggggtgatcaagggactccagaccaaggcaagcattattaaatattgactagttctgtgatttatgtagagctggaggaaaaaagtgactttttaaccattatatattcttcagcaacgaaaaccagccatttatctcctgctggtaataaagaacagagtgcctgcatattttagtggagggaaaacctggtcttataaatgagatgaactccttcgtgataacatttcagtttgttaattgccaaaagcaaaacagacaaattggaagcaattacgagatttgacttaaagaatttttgcggtacgggttcaactcaggggttggaaaggggtgaggttggaagcaaaaggagcatctgagatgggccccaggaaaattcgtgtcattggttcactggcactggaactctcatgtccactgttaactgaaaggattttgaatattgtcttgtcctgtcacccatcagcagctgggtgacatttacactgagggtagggaggtctgcatggctctacaagaacaaattaaacattaattcatcaaacttatttaagatatcatctgttcactagatttatacaaagcttattgaattgtctaatggctaattggttatttccttgacataatgaacaactgtatttcatcctttcctgtgatggctgctaaagagggggtggttagaatttataagatagggaaattcagctagttcaaagcaagtgtagtttcaacataaaagtgcctgcagctgggtcactattttgcaggagaaattgggctgtgtctgtaagacaccctcatgggaaccctattcttcatgtcaactcgtatcctgaactaaaaactttacaaaaacattaggtttcgtaacaacaagtgaagtggcacgtatcaaagtgtgatttttcttaaaaattgttcacttttgaccacgtattatgttctcatgaatcaaaatttaaaagatagaaaaaaaggaagtaaagtaccaagcctgttctgcagtctcagaggaaaagtagtgtgctcagcttcttatatccttctagaaatatttgtcttataggtgtgtgtgtgtgtgtgtatacataaacaaacacatatttcccccatttgtaaatacatatagttttcatctcacacatgcaacattttatactaatgataccaagtggtacacattattttgcaccatgctttttttccatcttaataatttcagagaaattatcacagcaattcctaacgagcttcctcattctttatatagcttggtaatattcaacgggttagagcataccatcattggtttaaccagttccttattaatggccatttaatttgtttctaatcttttattatttcaaataatgcctcaatgaataaacatatgggaatgtcctttcacactttgcaagtaaattaatacgataaattccttgaaatgaattgccaggtcaaggaaaaatgaatttgtaactttgtaagatactgtcaaatttcattccatagagaccatataatttatattctcagaaaaagtatgagggtgcctgtctccccacagtcttgtcatcagagtgttgtcagacttatctttgccaattcgatatgttaaaaatggtagctatttcacagtatcttgagtagttattaggaattagttggaacttatgaacatattttcttaagtttaaaaactgtgtttcttttttttgtgaatgcttcatttgtatcttttgcccacatttttacagaggtttaagaagttctttatatattaggaaaatctgttatattagtagaaatttttcccttcattattgctttttcctagcactctactgctttcttttataaaatatttatattcagttcatctgaaatttatactgatataatatgtcatgtatgggtcaaaccttattttcttcccagaaaattttcctttctctcaaaaccatttactgaataatccttattgttccccactggcttgggttgtcatctccaagagctcctaaatttccatctttattaataaatacgtgtggacatatctgtacctttatttacattatcaaggtatcttaatgattaaaactgtagaatatattttattgccttgtagatctagtcctcttcattatttttattttatataatttcctacttattatttcatatttatttttttcaaacaatatttatatatttctaattttaccccagaagtcctgatgctgtttttataaggatggaacagaatttacaggtgacttaggtagaattaatatctttatactgtcgggtttttctgatcaatgatatcattatactttctattttgtgtcttttgtgtctctcgcaagagctcaaagttttcttcatatagatcttgcatatttctgttgtgtattcattaatattttataattatacatgatttaagtaattatgataatatatacattttacatattaacattaaaattaaataactgaaaagagctactttcaataattatatgtagacttcactcgcagatacctgtcttctgaaagccacgattttaaatgtttatatctattagatgatcgttcatctaacttttacaaatatttgaagtttttttgctgctaagattattgtcattttctctaaaatgcaggcatcttaccaggggaaaatgataatctaattaattagactctcaactagtttgtggtgtgtaaaatggcaacaaaggttggacctgaagaatctctgtcctgacagaatttacaaataaaaaagctaaggcagacaaacttagccaagttattctcaagtgcatgaggcaggaaagaaactagatggtgtgacaagtggaacagaaataattaagggaagattttggtaatactgggtctttctctttaattatggatgagaataaactgaatatggaaaaactaaagagaatgacggagagagcacaaacacatgtgaatggcaaaaattaacagatcaaccaacctacacttggttatattagaatgtatttttgccatttgctaacatccaccataaaagtaaggattagcacttttctatgggattctacctgatttgaaacatctattcaattatgaggaacatatgatcaacaaattagtttttctagggtgtgcaagtgccatttactgacctggaataagtgctttgctcaatgactctcaagggtgcaccattcaccttgcacaggtgaatagtcaactcccagtgatcactttacaacatcttcagtattttttcacacatatgaattaactatcaatttaaattatagataacaggtttataatcattccttgtgaaacatattgaatatataatttttaaaaaataaaacaaatgtgtaagtttgggaatacaaataaaactttacagcatagtagtagcaacctggcttatgtaaaactatttataaaattataaattctattccatttaactggtagatgaaagtattgtgccatgataatttagggttacatcattattttacagagcttcaaaagtattctcagctacaaatataaaacaacctaattgtcaagaagaaaaataaaaactatgaaaagataaagaaaatattctgagatcctatagaataatttttacaaatggcagcttctttactactagacttcccttggattcttcacactgatcctgtacttagtagacaatgccatgtcttagtacacatatcctgcttttttcttaagtggttattgtggagtcctctgcgaattgtttaattcttcattatccttccttttgaatgaattgggacgtgatcttcattgcttgatatcctgacagattgctttgtgtcagagtttctaaggcaaggcaccagcgtgtgctaattgctgagtcctttgtgcactgttaactctcacctgctctgaaaaactggattgcagcttagttttcatcttcaaatgtctctttctcctaatcccctattttgtgctgtgccacagaataaagatatttatttgaaaaagagagatatggattactgtgggggaaaaaagagggtaaatgaaaatgatccttaagcattagcaaagggaaatggcattttagaaaaacaaaagaaaagcaaagcagaatgatcagtttttaatgttgaaactgaatcatttcatggatctcagataactctttctgaatgtggagaggtacaacaaacaggttttaggtgacttttcccagagtaaatatgtctaatccaaaataagtcctcaaaagtaagggtggaaggtaaggaccgggaaagaaaggaaatggaagatagaaagaacaatttttaaattgttaaatgctcatgaaatgagcataatcagatgctttttatttgcttataagacctgatggtcctgaaaaaaagaaacccaattagtatttaagaatgtttttaaaaaggcaaatgaaaatttgggaaatatatctgttatctctaggtggttatattatgaatggtttgtcttcccatttttccttttatatgtactcaacttaaaaaaaattctataatatatacatattatttttgcaaaacattataaaaaatagctcacaagagcagatgattcaagagcagagtaatttggagtaagcatggtgcttctggctccaaggaggagatccgggtggtgagtcagaagtcctaaggtggaagcttacagaaagaagggcatcttcacatatttccaatgattattcaggaaaagtcttttggtgacttgtgggatgttaaatttaactttcttcttatgttttggctgcatatgtttttccaacagttgctaggggtaatcaaacaaaaacaccaaggattctgcaaaacagaaaagaaaactaaataggagtggtcagagaaataaaagagcctctttatacctgagacataatggtagtgttaggggaggactgaggcatgggagatttggtttttttgaggttacattgtggggatcaggaggggcataaagtttttactgcagtggtaacatctggaaggagtggggtgccttaaagaccgattaggatatttccaggtagaaaagatagagtataaatgtgatggctccccatcccccattctctgagcctaaactttttcttctgttataattggagtccatatctcatttcaatattggtatcaagtgtttgctctttgggataaatccccatctaaaaacaaaagaaattaaaggggaacggaaactgcagaaatgcagaaagtatttcattgctggtttaaactagatgaaagtgtatttttaactacagttccgaaaaatcctagcacccagaataggcttaccttctcctggaattgccagttaccagaaagagtgctttagaatgtcagtatattcaaatgctctaaatctctaaaaaatcttgaaaaaccaaagaaatgcagttgatttttcaaggttacccagagaaatccagtgtccttttcacacactctggttctctgggtgcttttctccccagaatatactgtgttttataaaaattacaagatggaaaaaaaatatacagaagcgtttattttcttgagaaggtaaggaaaataattatatgtgggaacctcttagacttccaaagagtctgtaggaaggctaatgctgttaggaaagggacagctttgttttatagtccctggtatctgttttttagtgtggagggaaatctgcggtttcagagctgtgcttgcaacccatgcagtatatctgacacgctgccctctgggaaaacccgccagtgggggaattgttccagtgatgcagtacagcttgtaacttggaatcccgtcggagaactttgtagttgcttgtcagtcagtgggaagataaaagaggcagcttcttttcaagcaatctgaattcattttcccgtaatgagttagggggtcaggcagcaggagtgagttcacctgagatcttataaagtatatttcctggtggaagaaagagaggaggagaaaagggaacataacgtccaccacgcagctgtagaacggcgtaatgtggcttgtcgttggtctatttctttttatgcccacatattctgatttcagagcatatatttttagaaagaaaggtcaaagaaagtacagctttatctcatttaaaaatataaaacccaatctgtgaaaattgaaacccagttaaagtctaaagcagcaagtgatagtgtttcatacacaaatactcatcaagcaacaacatgttaaagatattgtactatgtcttctgacattacatcattattaaccacacaatttattttagagacttagaagaaattaaatgagtgtcatgataaggagttcttttagttacagacaacagccccagacctctcttcctgaccatttcagatgttgtttctaaatcagcacaaaagatattaggaataaaaactgtgggagaatgttcttatggtcaaagcaagtattaatataaaaaacattgggaatgtaggggaaatagagaaaattactctgtttctatttgtttggaagcaaatgtctcttatgcaaaaaagaaagtatagttattatatctttctgtaagtttccaacacatttctggatgtataaatacatacaaatctaaacacttgggaaatcaaaaggcattttttctggactacaaattatggccatattgttaatgaaaatataaacgggcaataataagatatctgtcatttcaaatattgggctatagaatgtatatgcactgaatgtattgacacttctgattgtatatcatgtcatggccaataaagctatagaaatgtttaattaggacatattcttccacaagaatggagttaagcattaatttatcaaacttgtttaagacctcatctgttctcaacactcacacagcagcttattgaatttgtctgatatctaattggctattttcttgacataatgaacaagtgcatactctatgctgttgtgtctgttgaggcggcgatgtaatgatgaaatggaaattgtaaccatgggtcgtacactgattcaggatatgcagcccacagagccatgagagggcacaggatttcattgtcctcatggcttaactttatgtttcaaactctgcagagcatctctgtggaggaatctctccattctaactcctcatgaaaggagcctgttagaagcaaaatacaatcagcagatcacccagatgatgtacctttggctttggaaggctttgcataatttaaaaaataaaataaaattctcctatttagagaaatttttaaagcatttaaaaatactcacaccattttcaaacccacaccacaagtgatttgggggatttctaatacatgcatgataaagttcaactggataagccagccgtggggcagatatataatgtttacctatagttgtgtaccactgatatgcctgtctagtgttggtttttgcatgctttgttgtggcaagagttcagtgcttgttgaataaatagtaatattagaatcagtgtttagattttggtagactgaacatatagccattttacctaggaggttctcagtaggaaagtgtcagctgtgaattgatgttagagggaaacagaagaatggattacacagagaaatagaaaaaaaatctagccatctggggccaatgtccttctctagcctctaagacacaccctacagcaaggaattcccttctctgattcctgaacttctcctgtgggaatctagggatcaacttccttggatggtgatgggtccttatcattatacagagttatgaggattacaaaccatatgtttggccccttagaaagtgataataggtgactcctaaatcatagttctatataccaagaacagcccacatcaaacatatttcccaaatttttgtgtgaaattcttcataatcaatgtgttactttactcaattattagtgttgcagaatctaaggattctagtgggctatttatgaaaaaaaaagtatatggcttttagagaatttggattctttatttataaatcgggttgcaaataaaatttatgtttttccttctagcaatatgcctttggggagaagcaaagggagttttacacccaagaagcagaaatcaaaaatcatagaattaaattaagaaatttatttgtttatttggacattcattcatttgttcatgtagaaagcatgtatctagcttgttttatggaacaagacagaaactaaatgatagctgctggagttgagtagagaaattttctctatccagagttgaatcatatgttgttttattgtgctaaatttgttagacatttaaatttatacgaatgatggtgcctgtttctgggatatttattccttcccattgtaaacctatttctccaaatcatcactatgctaacttaatcactatgctttcaacatctgaaacatttagaaagtacttaaatatctggcaagcatggtctgtgtgctgaaggggcttgtggtttaacaaggggagctagaaattacccaagtaatcatatagaaatataaaattacagactttaataattattaaagtaaaagtatatataactaagattttcataataagaagcttaatataaattggagggtcaagaaagtttctttgagctgatgacatttagggtaactgtaacatgactagacaccaactcagaaactagaaagaggattccaaagtgaatggcatttgtaaaggatgtgaggaaggtaaaattgtggtggatttgaggaaatgaaagaaggacattgtagctaggctagggagtgaagaaaagaatggcacagatgagactagaaagttagacaggagctacttcatgcagcagactgttttaaggactttggcataaagtaaaagtgtagttgcaataattacaaaaaattttcaaattttcaattgtttttttttattattattatacttcaagttttagggtacatgtgcacaatgtgcaggttagttacatatgtatacatgtgccatgttggtgtgctgcacccattagctcgtcatttaacactgggtatatctcctaatgctatccctcccccctccccccaccccacaacaggccccagtgtgtgatgttccccttcctgtgtccatgtgttctcattgttcaattcccacctatgagtgagaacatacggtgtttggttttttgtccttgcgatagtttgctgagaatgatggtttccagcttcatctatgtccctacaaagtacatgaactcatcattttttatggctgcatagtattccatggtgtatttgtgccacactttcttaatccagtctatcattgttggacatttgggttggttccaagtctttgctattgtgaatagtgccacaataaacatacgtgtgcatgtgtctttatagcagcatgatttataatcccttgggtatatacccagtaatgggatggctgggtcaaatggtatttctagttctagatccctgaggaatcgccacactgatttccacaatggttgaactagtttacagtcccaccaacagtgtaaaagtgttcctatttctccacatcctctccagcacctgttgtttcctgactttttaatgattgccatcctaactggtgtcagatggtatctcattgtggttttgatttgcatttctctcatggccagtgatgatgagcattttttcatgtgtcctttggctgcataaatgtcttcttttgagaagtgtctgttcatatcctttgcccactttttgatggggttgtttgtttttttcttgtaaatttgttggagttcattgtagattctggatattagccctttgtcagatgagtagattgcaaaaaatttctcccattctgtaggttgcctgttcactctgatggtagtttcttttgctgtgcagaagctctttagtttaattagatcccatttgtcaattatggcttttgttgccattgcttttggtgttttagacatgaagtccttgcccatgcctatgtcctgaatggtattgcctaggttttcttctagggtttttatggttttaggtctaacatttaagtctttaatccatcttgaattgatttttgtataaggtgtaaggaagggatccagtttcagcttctacatatggctagccagttttcccagcaccatttattaaatagggaatcctttccccatttcttgtttttgtcaggtttgccaaagatcagatagttgtagatatgcagcattatttctgagggctctgttccattctattggtctatgtctgttttggtaccagtaccatgctgttttggttactgtagccttgtagtctagtttgaagtcaggtagcgtgatgcctccagctttgttcttttggcttaggattgacttggcaatgcgggctctttttttggttccatatgaactttaaagtagttttttccaattctgtgaagaaagtcgttggtagcttgatggggatggcattgaatctataaattaccttgggcagtatggccattttcacaatattgattcttcctacccatgagcatgcaatgttcttccatttgtttgtatcctcttttatttcattgagcagtggtttgtagttctccttgaagaggtccttcacgtcccttgtaagttggattcctaggtattttattctctttgaagcaattgtgaatgggatttcactcatgatttggctctctgtttgtctgttattggtgtataagaatgcttgtgatttttgcaaagatactcctcgagaagagcaactccaagacacataattgtcagattcaccaaagttgaaatgaaggaaaaaatgttaagggcagccatagagaaaggtcgggttacccacaaagggaagcccatcagactaacagctgatctgtcggcagaaactctgcaagccagaacagagtgggggccaatattcaacattcttaaagaaaagaatttttaacccagaatttcatatccagccaaactaagcttcataagtgaaggagaaaaaaaatactttacagacaagcaaatgctgagagattttgtcaccaccacacctgccctaaaagagctcctgaaggaagcattcaacatggaaaggaacaaccagtaccagccactgcaaaaccatgccaaattgtaaagaccatcgaggctaggaagaaactgcatcaactaacgagcaaaataaccagctaacatcataatgacaggatcacattcacacatagcaatattaagcttaaatgtaaatgggctaaatgctccagttaaaagacacagactggcaaattggataaagattcagacccatcagtgtcctgtattcaggaaacccatctcacgtgcagagacacacataggctcaaaataaagggatggaggaagatctaccaagcaaatggaaaactaaaaaagtcaggggttgcaatcctagtctctgataaaacagactttaaaccaggccgggcgcggtggctcacgcctgtaatcccagcactttgggaggccgaggcgggtggatcatgaggtcaggagatcgagaccatcctggctaacaaggtgaaaccccgtctctactaaaaagacaaaaaattagccgggcgcggtggcgggcgcctgtagtcccagctactcgggaggctgaggcaggagaatggcgtgaacccgggaagcggagcttgcagtgagccgagattgcgccactgcagtccgcagtccagcctgggcgacagagcaagactccgtctcaaaaaataaaaaaaataaaaaataaaaaaaataaaccaacaaagatcaaaagagacaaagaaggccattacagaatggtaaatggatcaattcaacaagaagagctaactatcctacatatatatgcacccaatacaggagcacccagattaataaagcaagtccttagagacctacaaagagacttagactcccacacaataataatgggagactttaacaccccactgtcaacattagacagatcaacgagacagaaagttaacaaggatatccaggaattgaactcagctctgcaccaagcagacctaatagacatctacagaactctccactccaaatcaacagaatatacatcctcttcagcaccacaccacacctattccaaaattgaccacatagttggaagtaaagtactcctcagcaaatgtaaaagaatagaaattataacaaactgtctctcagaccacagtgcaatcaaactagaactcaggattaagaaactcactcaaaaccgctcaactacatggaaactgagcaacctgctcctgaatgactgctgggtacataacgaaatgaaggcagaaataaaaatgttctttgaaaccaatgagaacaaagacacaacataccagaatctctgggacacattcaaagcagtgtgtaaagggaaatttatagcactaaatgcccacaagagaaagcaggaaagatctaaaattgacaccctaacatcacaattaaaagaactagagaagcaagagcaaacacattcaaaagctagcagaaggcaagaaataactaagatcagagtagaaccggaagacatagagacacaaaaaacccttcaaaaaaatcaatgaatccaggagctggtgtcttgaaaagatcaacaaaattgatagatcactagcaagactaataaagaagaaaagagagaagaatcaaatagacgcaataaattttcaattgttacacagttgaatattagttacatttagtagctaaaggcttagattggagtgtcttttttcttcagagacagttttgttaaaatggtaccagttagaccaggtgcaggggctcatgcctgtacccagcagtttgggaggctgaggcgggtggatcacaaggtcaggagttcaagaccagcctgtccaagatggtgaaaccccatttctactaaaaatacaaaaaaaaatattagccggacatggtggtaggagcctgtaatcccagctactcgagaggctgaggcagagaattgattgaacccaggatttggagattgtagtgagccaagatcacgccattgcaccccagcctgggtgacagagcgagactctgtctcagaaaaaaaaaaaaaaaaaaggtagcaattataaatgtgttattggcttgcagtcattttttctatggagatatacatatgtgtattcatgtgtttgcatatataatgtattgagatcttactacaaacacatatcatattttacacatttaacattatatcatgaatgtttcttgtattacacacaaaaaactcataacaagtatttaatattcaataggtacttaatatactatagtatagatgtgccaacatgtatttatcaattccttattgttggatatttaggttttttattcttactatttgaaagaatatttattgttaacacatacttctacatttttccttaatatgtataacaacaaaggaattgctaaattaaaggttgagtatatttttgaagacacttgatatgcatggcaaaatgctttcaaaaaaattacatcatttcacatggcttctaatagtatacaaatgtgttcatctgtctgtagttatatgcatttgatagataaaaatggtaggttgctctaatttgcatttcttttattcctattgagaccaaacattttccatatgttcttttcctatttgtttgtctttctttttttgtctgctcacacactttgcccagaatattttagaggttttaaaatttgttttggtatttatggaagctaaaataatatagatagtaattcttagtcattacaattttaaatattttatctgatttatctttttggtctttttatgaggtttatgatgtagtacttcagatttttgataattaaatctttgctaatttatttttataaaaaatattttctccgtctacagttgaaacatatgttgctttattttgctaaatttatcagacttaaatttgtatacatgatgctgcctgtttctgagctatttatttcttctccttttacctgtttctaatctgattgaattgtggtgctttcaacatcttaattatttagaaaatacatttgtatcttatgggtaaagtcattattttctcccttcaggttattattcatttctgttaaaaggtcttagttcttttcatatgcatattcttccagttgaacattagattgagttgaaaaaatgacagcaatatttttaatggagtctccttcttatacattaattcttctgaaacttacatcttaaaatatttctcatctagaaatgtgttatttttccatttacttaagcagcttgtatctccattaaagttttgttattttccccataaggacctcacattttttgttagggttattccaggtatttttacttttgtgatggtgttcatttatttttattataatatttaaaaaatctctggtattacgtcagtgtttttaaaacatgccatttttattcaatactttaaaaatatttataaatctctgagttggcaatttctccagctctaggaagacagaaaatacacagatctgtacactcaaagaacgtgagtccagcccactcagtcatatgaacttagctggatataacacgttaacagacaggatagacatttttaccttgaacagaaagagctgtaattcaagttctgtgtcacagatacaatccgtacattatggtttctttaaataagccataaccaattttttttagtaattatttgcttccagttattcatgtgagattattaaaataagcttatgaagtaaatataagatgtttcaaatattcctatccattgagaaccccagaaattatccttattgaaatttttagaaaaaaattagataggtgcacaggaaaatccttataaaattatgtccctgacagagtttatatgtataataaaaatcaagagggtgggtgtttctaaatattcaactatatggattgaaggcattgtggtaaatccattacaaagattatactgtatatttgttgatgagaaaatatatattcttacagctataaaacaatgagcatcataaaattctatgattgcaatatatgacagtagatcatatatgtatagatgtatgtccatatatacgtgtgtgtgtgtgtgtgtgtgtatatatatatatatatatctgaacaaatatgaaggacacacaccaaaatataccaaaatattaataacaatgattatcttcacattttaggtaatttcagcttttctctttatggttgctgatatagccttaacatttataataaaaaaaaattcttttgtagttagacaaagaagaaatatgtgaagccaaaataggaaaacatgggggaaggaaggactttatatcatgtttcatctcatagcaaaactattggaagcatttcagaaacaaaagaccttaaaacttcaaactctaataagaaattgggaacaaaaatcttgagattgttatacaagagatgttaaagaccttaggcctcagtttctttcagaagcccagcaattgcaattattatttattatcactttacttttgcttgaatctctttagctaaaggtggtttacttccacttttccctaataatttatgtcttcatgataatagattttcttattatctttctgatttgtacctgtttcctatttaatgatttactctgtatggcatacatgccaaagttatcatgctagaaaaattattatgctataataattatgataccatcaaactgaattaaattatgtttcattgtaaatagtaaaatgtattaatttttttaaaagcttttttatgccagcggagataaataaagttacctttatgtactttcattaaacacaatgacagtacaagccaaactgataacaaatcaacgcactccttcttgtaacactcctaagttgttctgaaatcagctttcttaggactatgaattcaatgcaatgtattaaacagaatctgtgccttctgtgaataaaagtttcacctccatctcttgtgagtatatgtaggcagatctttgaacaatgaggttttcttccattgatttaaaatgaaaatgaacctggattttaaatgtgcattctaattgtccctttagcacatcagaacagcactgcctaatagaaatataatgtgagctacatatataattttgaattttctaaaatgcacattttaaaaaagtaaaatgaaacagttaaaactaatttagtagggcttggtgcggtggcttacacctgtgatcccagcattttgggaggctgagggtggcagaccacctgaagtcaggagtttgagaccagtctgggtgacatggcgaaaccctgtctctactaaaaatacaaaaattagccaggagtggtggtgcatgcctgtagtctctcagctactcaggaggctggggtgggagaatcacttgaacgtgagaggcggagtttgcagtgagccaagatcacaccactgcactccagtctgggcgacagagtgacttagtctcagttaaaaaaaaaaaaaaagtaatataccttatttaatacaatctatctaaaatatcattattttaacatgtaattaaaacctaaaagttaatgagataatacattattttttctaccaaatctatgtctgtattttacacttataggatatttcaatttagattttttatcagatatattcagtctgcatttagatgtcataagttttcagttgagaaagtagatccacataccaaattgtttcaaatgtatttaaaagttttccagtaactgaatcaatgatcaatttttaatttaaattcattaaaatcaaattagaaattcagctcctcagccatactacccacatttcaagtgctcaatagccatatgtggataggggctattgtattggacagcaaaggtttagaacacatgtataagatgttaacacagaggaaaagttaaaagttaaatcaatgccaaactattgggaatgttttgtctaccgggtttcaagaaataatgacatgactgatatttttcttattgaatcagctgctcggctggttggctcaactaatagagtcaaacagttgctgggttttataaacaaatcatctccttttttatttggtcctccaattttcttaaggcaaatatttgtgccaaattatgccaaagtctgtctctcctgaatatccctgttatcctcgaatattgttgagtgtcccatgaatataactgttaaatgctgttttgagttaaaaccaagaacacctatattgagaaaaaaattaaatgtagttaatgttgtaccaccatgttttgttctagcttctcaactgtctcatgtaaataagcacaataaacatctactgagtgattctgtaatagtttggatctataggtccatcatttgtgatgacacatagaagttggcccaggaaagctaaaagtatgtcatatgtcaaataatgccttccaccaagtttagagcagcatttcttccccagcattacaacttcatgtaatggcacttggcagtattggcatttctgatatgacttcttttggctagttcagaattcttaaaaaataaatagtttttcaccctgtgattgaaagggttaaatagtaccaattcattacactcacaaaaggatttattttgttctcataaatcagttttattccacatttttattattcccttgggtgagctactccaattgaaatcaatacaagtgcaagtgagacaatcaatctcgatatttgattatggattggagattcccaggtccgctttttagccagtttctttctgatcatctcccccaaagaactgaatatttttattgacatctatgagttctgaacatgtttagaaagaagataataatcttcatttgtatactgacaatggaagccccacaaatgaacaaggattaaaaaataaagacttaaaatatgtagctataacatcatcagcaaacttcaaatttctcaatatttttcttaagatgtagtcatgttttaaaataactttattctttcttttaaaaaaagacctgttaatacaactggtggctacaaaccacattcttagggtgctattaggtaaatgattatttttcatgacaaagatattatttattttcacatgcttgtttcagagctgaaccatatcaactggtctaggttaacaataagaaaacagttaaggtgaataaaatgcctttgaaggtatccagcctaggtcttttcatttctataattgtccaggctggaaagccaccatctgggggatttaaaagagaaaaacagctcaactttaaattagagagcaaaattgattaagttgttcctcaatgaggccaacatttatatatcaaactctctttgctttacaaacaaatttatatcttatgatcctttacatatcgaatgcttattttgggactcatggtaccatattattgttctcttgcctctgactctagccacctgttctaggttcttaagcaaaatttttgaaaaggcacaattaaacctttccgtaattcattatttgatacttagaataaggcaattatttgatgcacttatctaatcatattcttaaaataaatttcaaggtaatattaacactgcatttgttactttcagcaaacattttagccttatttagccatttactaattttcactagaatccattggaaggggatgtttcatgttttggacaaattacctaccactgattttttttcaggaagacatataactttgaatgttgtaaaaaagtattttagaaggagttaaaatagtaaacccatatttctttcatttaagcaacattaattactcttcagttactcttattaagcctttagaatagcagctgtataagccatataagccaggcacttggatttccactggcaaacttcctaggcatgtggaattaggggactgtctagaacttatttttgtccagcttcatttccttttcagtaatttgcatttattaatgctgaataatgaaagataatcaaaacattaatgaaggtatggtgcagtgatgtaacaaagggctatatcaacaaaatattctttccacgtgctttgttccactctttaaaaaaaatatttactcaagagaatcattctagaaactggaaattgctccctttattcaggaaggcagtatattttttaaaagttagcttctttaattgtttaattcagaggttggcaaatcttttctataaagggatagaaagtaaacactttagactttgcaggcaatatagtctctgccataattactcaattctgcagttatatcatgaaaattcctagaaagataattacttttgttctaataagcctttatttacaaaaataggcagctggccaaatttggcttgtagattgtagtttgtgggaccctgttttattataactcgtttatacattaaaatgcaatttacatactttccttggatatttcaatcttctcatgattcatttgattttgcaaaaattatgaatgctaatttaaaaatctatgtaatacagaaaaacaacatccactaaaatcccactacccataaataaccaatgttaacaaacagtaaacattattttagagctgtctcaattcatgggtgattcttggtagcaaacaacagaaacaaatttggttaattcaggcagagatgaattatattaaaggaattcaacagttcaaaaagttgtcaggaaagctggagagtcagacttgtggagaaccacaaataacatagcccagaccagcttatgccttcttaggacacccccactggcaccatcaccattcagtcgccttggaaaattatcactctacttctggattctcaacaattttagaggcatcttgaataatccttagttgactgtgagccattgtttcactggatcaagctttgtagtccccagatgaaagcaatgcaactgactggcagtcccatggtcttaccacatgaacttcaggtgtcctttcatttacaaaaaaagagaaaattaagttatgtttctaatcatttctttctacatacctattatcttctccctgattgttagagtttcttgatctttttacttatgcattaattatgattctctcaaggcttttcatcataccattgatttagattttagctctattctgttcctggctttttctaacttgtttattaaatacttactgcattttttaatttccagattgtttctctgtctctgcaatatcattttatcatattatagggaatatatatcattttttcccaaactacatggttattttgtctttttatgttacaatcctttctttagctgtatgtataatactcgatatattatttttttcttcaacttcatcttgcttatgccttgtatgggcagctctgtccagattttgcactggttctgagcttggtctacttcctttcctttctggtgctagtcagtcttctttcgacctaaattttgagcactaggtgttgctagagggtgcgaagatgcactgggcagaattctggggaatccagattttctgtctcctctgagatcctattatatagcttttgtggcagcacttgctgcatttattcacatgtatctcccacacctgggaacaccagctttttcccccaactcagcacagtgcttggcaggatggccagccctgatttctcttcctgtctctgcagactctactcagttcatttctctacatattggagaggattttttttggcttatactccttcctctgggaacaaagttaggagctgcgctatactaagaaggaatttaccatctctttcttcttttaggtttcaaaattcatgtcggtcatttttttccttttcctttatacatttgtacctggagaatcttcaactaaaattgttaatgttactgttttcatagtttgtttccattctgtcaggtattttggaaagacagttgtgtggtaccacttaatttagaagctgtgaaagttcacaatttgtccaaaatctctttctagcaaggtgattcatatatacagttcagagactaacagggagactgtaaggtggcatctgactttccccacctcctggtgttcatgtccttgtttactctccttcccttgggtgtcttcaaaacctgtgacttgctgctcaccagtagaacagaacaaaggtgatagcatgccacctccataagattgtaacctgtcttgctagaagactccctctttttgatacagcaagtggtcacactggggaggcccatatgggaagaaatgagggtgaacgccaggcaacacaaaactggtaactgagagcagccttgagtcaatagccagaaaaaattgagaccctcagtctcgacagcctacaacaaattgaaaactatcaacaaccacctgagcttgcgagagatccttcctcattggaaccttcagatgggatttcagtcctggccaacaccttgactgcagtcttttgagaccctgagcacaggacccagttagctgtgccagactcctgactcacagaaactatgagattctaaatgtatgttgctaagttcgtggtgataccatgacacatcgataggtaactaacacaggaacaccttactgtgtgactgtagcaaatgaaacaggtagaattcaacagcaaaacatgatatcattctcatccagacccccaagtcgttgctcttcttttacagaggaaccatctcaagtatatatcttccagtaattagaagaaaatgttaaacatgtcattaaacaaagaatggaccataggctttgtctgggatcaataatggttgtcaaattacttgtctgatcctagtagcaccacaggctcagcaggttcagcatggttagtaaggctctaccagaactttaaaaggaaacacgttttggtgataaaatagttgtattcatgtccagtgtttagtgtggaagccggagaccactttctatgagagtatatttgttcaataacttttagctgattgagataacagcatcagtttgttcagctggaaaaaagtttgcccaaatggcaaaaaaaataagtcaaagtggaaaaaaaccctgacatttcagagcatatatggttagtaaaaatagaccatacttctacaatttacaatagtcacagtacatctctgaatttactctctctctctttctgtgtgtttatatacatatatatagtgaactgtactgaattttatatatcgtagtgaactttatatataaaatgtataatatacatgcatatatacatatatctttcatttttataactatttttagagcagttttaggattacagcaatattaagcataaggtacagagatttttgtctatcctttatgcattatagttcctttctgatattcataaaatgagatacatttaggaaaatctgactgtggtacatagagagagcttgatggggaaaaataaaacatgcttcaacaaactttaaaaaataatttgcgatatttagaacagtaattgtgcctacacgttaaaaaagatctagagaacaaaacataaagattctcgatatctatagagttgtcattgctcttgtatgggcacaaccaggacaaatgtgtctgaagcatcttttggtgagttgataaaatagtgcatgtatttattccctgcactacaattgtcaggctagaggaatgaccaatttaaagaggagtcaaagaagtacagctttgactagatgacaactaattaaaatcactattacagtaattacagtaatgtaagaaatatgatgcattaatcgagcaccgtcctcagaaggtcttagtggttcataggctatttatttctctttcaaaatatcctgtggagaagacagcttcgtaggcatatgtccataaatattttatacattgtcaaaaacttaaggccaggaatagatttctttcaccatatattaattacaaaataaacaaatactcagcacctttcagattcctaccaacatgagatctatcagaaaaatggaatctggaagaaacacttgctttttggttaaaataatttaaaataatatttttagaaggaataaataaatgtaacttaaatattaatacagggtatatagagagacctgaaattcttggctcacagtaaaggctgattttgccagtttaccttgatcacaattcagtgtcttctgattttggtattggcagaatttcgtgatagtgagatggaactgaacaactctaaaattgagaccttaataccagaaaaatatagtatttctttgtacagcaagaagtgggaaaaattagttaataccttttctaccttaaggtgtaattggattcagaaaaagactaacttaaagcaggaccaggcctgacatataaaatcctcacgaggtaacaagaatcagtttggtttgttcactgtcatttctcattataatctttgtcatgagaatggattcatgttgtgccattttctgttcctgttacaatctttgtcacatgaataagatatcaggatgttaatgcctggcatacagtattgtgtgtgttatgatactgtacaggactacgctgacctttgcaatattatgtattctgattggttgttcatgtcacctctttcccacaagttaataaggctgtaaaaaggagagaactgaaatggccagccagtcaaattatagaatattgaaaaggtcagagcagtccagcacagagaaaaaaaaattatggaatatatggtgcattaaaattcttgtgacaatgattgtaacaagaataggaaaggatacccatttatgttattccaatctagagaaccccataggatggtattctcgagacagcaatcatttacgcatccctgagtcatacatgtgaaaatatccatttatgctgttttttccttaaaaataattgcatagattttctactattcaacaaaaaagagcattgaaaataagattttcatctcagaaaaggggcattaatattgttaacatttcagttaagactttatatttgagactaaagaaaaggtttttttataagtaaaacctgttgttcatatgagatttatttggtctattttttcatgtaacacttttctttgaaataaaataggagagtaggactgaatgaattaacctttttcaagaccctttagaatgtgggatagaccgaaagagcagttaggagtttatgtagaaattctacatgatctatgcaaaacttattttatctttatgatgtgtgatgttggccaatacacaaaaaatcttttcttcctctgcatcttcagtggaaagatagtgacagagagaaagaggtataatacttaaatcagaaaccctgatgttattgttcttaagtgtgcaataattacttatttttcaaattgtttttatgcatattttaaattttcttgtagaacaacttcattggattttgtagcctataaggagacatctgttttaaaccttagctttacacttatttcactaatagagtaaacatgttatagtccaaagctagtcaaagctagtgatcccagcaccctatgctctgatgctcatccagtaggcctggcgtagaattcagatatatgaatgtttatgaggtaaccccaagtgattttgatgtaggttgtgcctggaatattggtattggcaacctcattttgcaaagagctaagtgagacccccagttaaagcccaatggctcagaccaagccacagagggtggaggagggcaactcaacttcaaatcacagtgcttgggtgggggcgaagcaggcagtggggagttgcggttccagaactcagaagcttaaaaggtcttgcaccatccacttatactcacaaatagggtcagattggagggccaaccagacaggaatggtcgcctgcgataggacacacttatcactttcacattttcaagcttgatttttgaggctgaaccaacgaggctgcattttccagcccactgaaagcccagtttatgcagtgaaaagtggcaaagcacaaccatctcaacaagaggaacctgagcacaagcattttaaaaatctacccctccccgcccatattgaggagcccaaattcctaaagttcaaaggaagaaaggaaagacagtgagagtgaaatggaggaagagctaaaatctgtggatcctgctttggttttgaatctggaaatttttgagcttcattgagggctgaaatcctgtcagttactctaggtctgtgaattgaactgtatgtttgtaggggtgagagaacattagactcactcagctgtatagttactggagatgtacaagttcttttttgagctgagcaaaatggttatgtaattgcatacttctcataattattgagtaattatatacttcttataattactgagtaatcattgttctataactagaacttaatgttacaactaattatataattaccatgtattaatgttgttatctaggaagcttagaatgaagtgctacttatatatctccccctgccatgccattttcaaagcaagcagtagtgtttgttttttgtttgttttacagttcaaaatttccttaaaaaacaaacaaacaagcaaaatgcaatggaaaaaacttcaccaatattatactcatacatatttactcattgattttgtatttgtccctggctgaaaatttgtaaaattatattctcatggcttaattttagaatttccattgttgctttacaaatttcaatcttttataagacctgcacagttacgctacttgagagtcaattgaatatctgcttgagtctataggacaagctgacctttttgaaagtttacaattgagcatgtaatgacagcagaaatacttccaaggagctcaatatcatggggacaggaggagatctccccatgctgaccatgtaattgttcttaggcaatggttaggatggtcatatttaatcttaaccaggtttcttgagtgcaagaattatgtcttatgtacttggggcatgttctcgtcagtgcctagaaaagccttctccttgcatgcagttggagctcaataatcttcagtagaagcaagctgactagttgtaaagaacctaggaaagctaaaatggcataaattggaaatgtctttttagtgcataatgaaattatcaaaggctgctttgtaggtttcataatgtcttgctaataagtattacacatatagaggagtgcattatctacttacattttaggaccttgaaatcattctttaagctatgaatatgtctttatctgcctttactgaaagtgaatagaaattatcattgtcacgttttagcccacaagcactgtttatttcctttgaagtaaactacttatttggatgtgccaattttgggtccagagtaataaattatattatgccattagggctttcttctgctcatgaaaaaaactcctgagtattttgtaacagtagatttttcagtgacttcctccatccctaaatggttataagtatctttttaaataactttttgtatgtttttacaatttgttggacctacccatatttcatgaaaatagtcaagtaataaccagatatcagaccctcttttgcattatttgatcttcattaatttcagtttgaaatataatctgatgggacaatgacacattggtaatggatgagattagtgctgctttattcattgaaaaaccttagaattttgatgaataatacattgttaggttggaaggggtagagaataggtaggtaattgctactgagaaaatgaaatacagagtacaaaattcttaatcacttgctagttctgaatggctagaatgtatcagttgtatggattacaacaaaaacaataacatcattcctagctgttgtttatgagcaactattatgtgctggatatgataaagaaataatctcacttaattttcacaatagcactgcaatgtaaatactgtattatcattcccagttcacagatgaagaaccagacattcagaaatattaagtaaattagcaaagagcacattgctaaagaatacaagaacaagttcaaatgcaggacttttgacaaccaaatttatgttctttcctttgcactatactttgctactaaactgtgttaaaatataatgtttttgtaaatattgtaaaccttgcattttgtatactatacgatgcaagatcacttttagtatgatgccatcttttactttttaagcatttgttcaataaagattatatcagtatctggagatcttgccagtatgcttgttcttctctttgaagctcaatatcatgtgttttttaattcatttgtctatatctgcagaatttgtgtgtgaaagattgaatgtacatataataaaaagtggttttatataggaaaaaggttatttgaagtaaatattggtgctcttttagataaaaaaatctcactctgtgacccaagctggagtgcagtgacacaattatagttcactgtaatctcaaatttgtgggttcaagtgattctcccacctcagcctcctgagtagctagaactacaggctcataccaccatgaccagataatttttaattttaattttttgtttttagagatgaggacttgctatgttgcctagcctgggtggtactcttaatcattcatttttctgttttttaagagttattgtatcatttctaaaagtgacaaacattaagcagcatttaaaaaattgtctcataaatttttcaggaaagcatctaatatagaaaatgttacaattttcatctgtagcccttttcttattttaaccctaattttttactcttaacctgaaatttaacctaatggtgtaagagagagagataaaacactgttactaggcagaagtattttcctgcattttggactgatgagatttaagaatgggtttgctaaagctttggaaggacagtggtgttgggaccagggtgaggatgtattaaaagtgattcttttatatagctaggcagcttctgcattttctcataaagctaaaaatattagatcttctgatcaaagtggacatatagtacctcccatccccagttgcttttcaagatattctgactaattgaaatttaaaagggcattagatagaaagaaatccacccacatttcaagcaaagtgaacagaaaacacctcagtttgtgaaatatacaatatctgacaaatatgtctgagtataatacgtatatccagaacaattctatttgaggaataatgtgttatttcttcctgtctgcacatccaaaaaaattcagggatttttattggaaaaaaaaccctcaaaaaagtataaacaactcatcaagtaatcaatttctacatttgtgcaatacttttacttatatgcttgatacttgtgatatggctttatcctacagttatctaagaatattcatcaaattatttcgattgccgtgatgaatgaattggccaggtcaactcagatagcacttttgttcacaagataataaaatccaaatatgtgcattgatagaagcacatgtaatgcctcttagagtggtaaagttacagacctatttggtacagtatatttagaaactcaagaaaatactcaaataatagcaggaatgaattcttaaatatgtatttattttaataattttcttttttaatcagtaggtaataactacacccttctgaatgtcacaaaagtcatgtacagcggagaagagacaaacctttgggtgctcatcgatgggctggttccttttaccaactatactgtacaagtgaatatttcaaatagccaaggcagcttgataactgatcctataacaattgcaatgcctccaggaggtaagtctatgcaaatgttggctatctaattttatataaatgccctagaattaagtttccattgaataccttgtttatttttagaggtattttattttagaacttagaggctcaattgtatttctggttcttttaatagttgttgttttgctttgtttattcagattctttaattgacgatcttttattgttttgttgagactgctttcatccacctcacactgtgtgtatgtgtgtgtatataccatacacacatacacacacacacatatatatatctggatttctgcatgttaagaaaattgggaaatgattttgttcaaggcgttacttaaagccaaaatttatatttgcaatttgagcttccattttctactgcaaatggttctcattcctggtgttctaaataactagttcaattgtatacttaaagtacttcatttggcaaaaagggcagggtgcagatgatagaataggaaaattccatttgcactactggaaaacacctttaaattcctgatcctaataattacagttcagcagggccacattcatgtgtgaaatgtgatacagtctgcatatttttattttaaatatttctataaaaatcgacctattcacaattaccattattttgatgtgccttcagcttcaccatgttttaactcgttgcgggaaataatcgcattgaggaaaacccctctagggttgacatggatggcccttgaacagaaagcatgcctcaaaatgttaagagcatgactctcaattgagtgctaaagaatgtgtgttttctgaaaatcctgaaggcaaaggaccccaggacatccagcatctgccctgtagcccatctcccaggaatgagtatattctgaactaagggagaatgtcacaatcttttatcagcaatccgaagggcaggttaaccccacttccagttatgaagagtataagaacacaaagtgctttatcactggagaaaaataaaagggaatcttcagtttgtatggaaccgctcccctgcaaaaaagattcattacttgttgtatcataaaaccacacactattatctaccttttatgccattattaaaattaatgaattgatgtttactaaaatacttgaaactgtaaatgtcagaagctacattacttaagaaaagaatgcataaaagaaacttttgaggctgatcaactcaggttagtatcatatttattgagacaataattttaaaagggaattgaatttagatatatttatttaaaaattgagactgaaacccaaaataaaacaaactccccccgctaaaataaaccttaggtattcatatcttcatttttcacttcaatacacatgctaggaaggatagaaaactgtgatggctctaaaccttagaatataatatcctttactcaaatttagaaattaaagagtaatcagtgccataatggaggttttaagttatatagtaataccttttctacaggatatatacaatatttaataagcgtgtttattttagggtatttatactgattaaatagtttgtgatttacagtaatttatatcatattcataaaatagggcaaatttaattcattgtttatgtttttaggaatgtatggtctaataatttgttatttatacatatatcaagattcaattaaaaatagcaaggtcctactgctaacggaatatgcgctatgtgaatatacctgtcagtaaaagggttaatattatacaaatagaaagaaactaaaatattgttttatagtggtgcagtcaaactgagtaaaccattaactgaggcttatcttcatctttgctctgtggatgcttatctgtgtcattaccataatgcactgcaggcccacactctctgggcctgatgcaatcctccactttatgtattcagaaatctagaatttgggagtcagtccttcaccaaagaggaagcaaatgtcttcaaagacagacagtgattcgctaaagtttattatggccattaggacatactttcttttttcattagattgttgttgattacaattaggaaacgtatagctttaaaattatcttttttatgaccttgtggcagtttaaaggtgatacctcattgattaaataggttttagttcatgcttccttttacttaatgatctgaaaacatattatcctgatttacacataaaaatcatgctgaaaagcatgtggcattcactagaatatgtgtgtttaagtagaattaaattagtactgagagttattaaagaaatcttccatgcctttgtccagtgaactgtgtttcattctgaaatgaataataaatggaccaatatacggaggcaaaccaacttatgggcagagaaggttctatatgctatttacttttccattatagttggattgttatcattattgccatttccttgatttcaatattagatctctcttatggtgatgttgaattcctagtatctttcaatgctgggtgatgcaagatttgtgatgataatatccttagctatgcttcttttgcatacttttaaaacataataagaaaagagttgggcaaaataaaatgctcttttttacttcatcaaatatttgctatcaaatatgacctggaaaatcccctttacccgtttaatctggccaaatcctactcattttttagcctcaaacctagaaattggtctatcagaaagtcatgttttgccaacagaggctgagatagggcctttctgtatcccagagaacagttacattatactgaaattgcctgtttaatctgtcacaatcactggttataagatcctatagagtaggaactgtttcttactcacatttctatcttcagcacctagactaaacctgacacatggtaggtgcataatgaataattggtgaatgaataaattagtcaagattgcttaacgacttgttttaaattttaagcttattattactcaggccctccaggcctcatctcaacctcagcaaccttgtattttagccagctgtgaaagagaccttctctgtacaccactgtccaatgtaggaatgctctggttatgtagataaaattgggagctcaaactgtaaggagggtgagtgtattggaggtgagaaatattctcaagttatgccaactcttcattcttttattcttccctatagtggttacttttctcaggtgagcatagaataaacaatccttagtttagatagtaatttggaaaggagaggtgaaagggtcatactccaaagaattttaccaggatacatcatctcttaatttgtagtcaggacacatcttatttgccagtcctacctctatttttctgatgagaaaaaatatataattaagaatatgataaacacaagttatttgaagatagaaattaaagtaagaagatggtgctactaataacttggcacatagatgaacagtggcaaatcccaattaacacacattttttatttgaaaaattcactttaaatattatttggacaactggaggggcgtctctgttttttccaattatgtagcagatccttccctacttctgcacactcaagttttttgtatttctacaattactatatttttaggttgtttgtaataacataatgctcatatttagcactaaggtattcttggaaataaaggatatatttaatcagagctcttgaatagtattatggtacaggttcaagagttctaggaaaagaattaaaaaaataaaaacgaatccaaatgttaatccataaatatgaaactttcctatggcctttaccccttcaaggtctggagttactaatggggttaggatttcaacgcttaatggggctcagtgcattagtgttttgtatgcatggaattcagcattcagtttaataagtggttgacattggtgatgtcccttaatttgcttaaatctaattggctcttttatcagtcaaacctgtatggattggcaattgatcagaaagggtcagccatgactctgcatgtagttaaatgatggaagcaccagttaaagtcacagttgcatgataataagcaaaagaagaacaaatgagcttagaggaggaaggcaaagaagcttagaagttttgcaggatcttcaagttcagaacaaaggcattatagagtatataaattttaaatacactgcattttgcctccagacttaaacctttttttttccagatgaactgaaatcttgtctgaaactgtctttgttacatcaaagaactactcagaaagctaaaagagacagaagaagcataaaagggcatagtttaaaatgattagtgacaaattccatactgacgagctagaaacagatttttaatgaaagttttatattattccaaaaggaataattctgtttatctttttctgaactgctttattgtaacagtgaaaggaacttggagccaccctggtttgtgaacctaatccaattttcctctgagagtaaataatttgtcatttgtacttttaagttgatgagaattattataatctacaaacagtgtaaaatactaggcttgagaaaatctgtttatttgcccaaatgtgttattagagaaccaaaaattgaaaaaggcaaaatggttgcgagtagtttgttttacagggtcttttcgactctctctccttcccctgaaccccctctccacttatccacctaaaatatcaatgagaaaaaaaagaaagaaagaaaaccattaggaagtaaaacttaggcacatcgcaaaagcatagacgttggagtcctagaaacaaggatttaaatccacctctttcactcactgcttgagtgactatgagcaaatctgcagatataactgagcttcagtttgctcatccattaaagaggctggatggtaattcccacctgactggaggattgaacaacatattatatgtaatgtgtttagcgcattgcctgtcttggtaaacatttggtgcttcctacctcttttgttctattttcctactaagactctttttggggacctggaaaatgccctatagaaaaagtaagtaaaaaaacctgtctttcacatagactgcagagaccagaataatttcatcttgctacatccctatcctttcctacacttaccccttaacatgttgacatacatatggccaggccagtaaccctgctaaggggtggttgtgatgcatattagatgatgaagtaagcaggaagcatgggaagtgattttctttttgaaataccttcagcatcctcctccatgacctccagatcataatttgcgaagatttttacatcaagctctcattggtcatcttgggatttcacatattttcttaatagaactcttcttctgtgtttatatagagctacttattaaatataattatgactttttaaaaaatgtctattattgtatattttattcacaaatgcttttttttacattgttaatgctagcccaaagcaagtaatttgaaattttatcctaagatgttttcatgttttcttaattgtcctcaaatacatatatttaaaagttacatcttggaattcaaactttttttcatttttcactaaataggaaagtttactagttgttcagccaatatgcttttgaataactaaataaaatgtttgcttttaaaagatgttagtatatgatttttgcccaataataccactaaaggaataatatattaatgactaacttttttagcttgaactactgaattccattctgtttagaatttaagagactggaatattctttcgggtattgctgtgtaacgagtcactccaaaagtcagcaacttaaaacaaccattctgtattatttctcacctgattgtgtgagttgtcagcatggttctcctggcttaaggaggctggactgggcttcttcagaattcccagaaagaaactcagggtttcaagagtcaagccctagtgtacaagccctgaaaacctttgcttgcctcaaactgtccaaagcaaatttcttgcccaagtcaaaaagcatgtatgctggaatgtatgatttactggagcctgataatttgtcaatcttccataaatgtctaagtgattggtttttagattgtgtatgtgtatatgtacaaacacatacatgcaagtattacagatacataatttttcttttaaattagttctgcttttgaaataatgatgtactagcaccaaaaaaaatgaagaaagcagtttactaaatttttccttgaagaagatataaaaaaaaatctttccttacatgacaattaattttgatgttttatttcagtataaagatcaataaatgtatatcaatagattcttgtttaaaatgtttgtagctccctattggagggaaaattctgatctcttcttataagtaggtgatttaaaaaaaaatcttagctatttctcaaatctaggccttgggtattctgatttctgcttgtaactttgaactgtgagagtagaaactgtgtgtaatttgaatattttctgtagctccagtgtctggcataaactatttgctgaataaattaccagagccctttgtggcagtgataacttggaaaataatcctgaaagttatattttgctattgctgtgtcttttacttggataaacattttccagaattaaattcaacatttagggtttaattcatcctaaaattatttttagtcctgttaagattaccataacagtgtaaaaatacataatataggaccctctggaggtatgtttataaatttgtgtgtgtgtttaattgtctattttacctaccattttattttttatttttaaataattccatcttttatattatgtttaggggtacatgtgcaggcttgtcacatggatatattgtatgatgctaaggtttcaggtatgattgatcctattgcccaggtagtgagcagagcacctaatagttttcagttctttgctttctcccactgttccccttctagtagtttccactgtaaccaccattttcaattaacttatctattgtgattggtggttgaacacttaactgaaaataatgattaaaacagaacatccaaaaatttaaatatatattaaacacaactttaatttagaacacataaatatatttatctatatatttatccaacaatcttgttatatagggccaagttgttttcttggagtgttaatttagtatttataagtccagcatatttgctgccaaaactatattcataatgcatagtttgatttccactttgaaaactcctttaaaaggagaacaaaaatttagagataattaaggaagaatctaattatagaatttttcaggcttttgtaatatcctaagtcttttagttatttttcctgaacgaatttcacagtattgttttattaagtcctcactgaaagtttttcaaagcagtaaattttcatagaaaacggtttctgttaacagtgctcatcagtttaagcattatttaattaaatgacataatcataatgacaaccacaattgacatcacaggtttaaaaaatacagctgactctttgtgagtgtataattctacctgcgactgcagaatgttgcccttgaactacagagtagtcaactatccatctctgcaatacagagtaaatgtaaattttttattaatctggcaagtcagataagaataggtaggtaaggctgggcgcggtggctcacgcctgtaatcccagcacttcggaaggccaaggagggtggatcacctgaggttgggagttcgagaccagcctgaccaacatagagaaaccccatcgctaccaaaaatacaaaaacttagccgggcatgttgtaattccagctattcgggaggctggggtaggagaatcgcttgaacccgaaaggcggaggttacagagagccaagattgtaccattgcactccagcctgggcaacaagagcaaaactctgtctcaaaaaaaaaaaaaaaaaaaagataggtaggtaaagcaagtgtctactatttaggaaaaagacacgcttccaaagtggcagaatgatccaccctcagagcagcctacccaagtaggagaggcaggacaatgctaccaaattcttctcttaggttaagcattaccacagctctgccttaaaagaaaaaagaaattattgattatatcccttcaattgattagggactgagtctgagatttgtggcataacttgctcagtgaacttatttttctccttcagtttttaaaggaaagaactgagctttctcttctattttcaaatttcaaccaaaatctctttctaagaccttagagcaatgaaatgtgtgggtagcactatcaaccagccaggtggagaatggtatttttttttttttttttttttttgcagggtctctaagagaattaggggcaactagaactggctcaaaaagcaagaatatacgaaagagcaaaagagtaaataaataagaattgcaaaaacaaactctattgtatcttgcactttcttcatgcattgtagcactgagaattgtaaaatatttctataccttttgtttgtttttgttcttgtttttttgagacggagtctcgctctgtcacccaggctggagtgcagtggcgcaatctcagctcactctatgccttttaaaatcaacttagtacaatgtcaagatgctactttttaaaaataaaactaatggttctcaaaaatgtgaaagcttgcttgccgagtacagatataaagctcctcaatatgtgttttccatttttcatctgctctgtatccacttagatttatttgaaatatataaatagaaacattaatgtgcaggtggcaatgggatatcttaaaaattgaaagagtacaaagggatggagattttaaaaataaacgtaggttagcagctgaaataagcaataggctaagatggtatattcccttattcagagggtagaaggaaagatgagattaactgctttttataatgtaaaagccacaatgaagatacaggatggtgaggaatagcattctttaaaacgacaacattctaccacataaacagatggtttgtctttaccttcagtatattaaaagctacacaatttatattacatccagttcatatgaatctttcgaatagttgtgcataatgttttacttctgtgtatatcttccaaatgtgctgctattttttccctggaaaaatcaacccattgaaagtaataaagtaggagaattcaacaaataaaaagtatttaaattcttaataaaataaatagtgtgctttcaaaaacacataccaggccatttaatttaacccatgctttctcccaggtacgagaatagaaccaaaggatttatgactgtcttaaacatgctctcaaatcctttcctgaaaagtgttacctttacttttttggaattgatagtttaacctgctttgtgtgtgtgtgtgcatgtatgaagaggtatatgtttgtaatattacatatcataagccaaagagagggataaattcctgtttcataatttgtgaacaattttttcactttttgtattcaccatcttgacaatgaacttcctgcttataaaaacaccttagaaaaagactaacttctgagctatggagaagagggaaggaaactttgaagtgtgcttactatggactcaacaagcctccagcaaagggctgccagctctccatatttgcatactctcatgtggattatatagaaatacacacgcccacacacacaattaagtgctatctttaaagcatcctggggcaagagagagagacttaaaaaaataaaataaaatcacatctttttcttttttaccaggggagaggggtgggaaatattgttcctttaagttccattgatattttctaactcacatttttaaaaagaataagtacaattcattttctttttttttcttcgaagacggctttatccataactttaagcttaaaaaaaaaaatcatgtctgtctgactgacactgcagtctaaaagcaacttgaagttttatttgaatttttatagtgccctaaagaaatttttgctttatttctttaaaataatatcttgttcctcattttttcatagacaaactgtatgcctgacttgcataaaattctatgaacatttacctgcctatataaatactcacaaaagtgagaaaattcttaatatgtcttagatacttagagaccatatttccaacctcttttcatcagcagcatcaagaaaatccctttttctatctctataaaggcatatagaccccccagagtctaaaagaaaacttaaaaacttaaggaagaatagattttgacaacagtagggaaattcacttacaaccactatgcttttcatgattgttaattaattgggacaaatgaaactagaaacatgagggtatctaatatatactttattagattaatccctcttacactttgatgaccattttcaaatgtatactatctttcatttttatttaaatgtttcgtatgcttgtatcatgtcttatctactagatggggaagataaaacgaatgggctgggtgtggtgtctcacacttgtaatcccagcactttgggaggctgaagtgggaggattgttgagctcaggagtttgagaccagtctgggcaacatagtgagaccccatctctatttaaattttaaaaagaagaagtaaaatgaaaaaaaaaatgagtgggtgaatggaggtagacagaggagtcacagctggtctccctttttctttctctatccctctcaccatttaccttggctcaggcatataataggatattagtaatgattactatcatgctcttgtgcagtcctagtggcctggggctatttttgcacccagcataccttcaccctttcttttgatgacagggctccaatttccctctcagcaccctgggctctttcaagatcagaacatgcacatgcgctgtgtgtgaagttgactgcatcaccaggtctgaccaatgaggacactgtattctcctaaccacagtgattttttttcaggaatgacaggcattccaatcaaagccactgaattgcagtaaaccagtacagtaaacagaggcatgtctcttgccctgtatttgaatatgggattcggctcaatttgctgccagccatgttgcccctcaaagagtctgagaaatttagtcagcaaggaagaaagcagagtgggtatgagagaaggaggtagactagattctggtgacgtcatttgatcctttgaatccagcattgccaaaacccagctctttcccttgagtgtttttttgtttgtttgtttgtttgttgattacaggaacccactacccatctcattgcttaagcctctatgtgttgtgttttctgccacttgaaaacaaaagcatttgccacaatgcttgagagaaaggaaaacaagtagagagcatttagagaagtctcatcacttcctgaaaatcatgccaaatgctaaacttaacatatgtgtttggcttttgcttgggctctcaaattaggaaacctcaagaagtaagctggatgtcacatgagataatattttctaaaactgtgaaatggctcatcccattctgaagggtctcctcagagccacttcatttgacaatcttctgagctgtttctccactattttcaggtctcagagccctgagttctagtaataactcttgtgctaattagctgtttggtctgacttaagtaactttacctgactatgatgttggtctcttatctctaaaatggcagatgtgaattagatcagcagtatctatagtgtgatcccagaccaggaacttcaacattccttgaaatttgcttgaaatgcaacttctcaaaccctactctcaacctacttaaccagaaattctgagggtggggccaagcaatctgtgttttaatgagattccattaccaactcccaggtcactgggtgccttcacaagtttgaagaccactgagctagaccatctttaaaatactttcaaagaaaaaatatatgatcttgtctatgactttattccatattcatatttgagacaaatactcagggaaaaataggtataataggcctccatgctcaactggtctttgaatatataagtcacattcgtagggccagaggtctttccaatgtaagaaagccatcgtgttgctcacagtcttcctgaatgggccaggaacagataccaaagataaccaattccagatgttgagttctacctgtggcaccagaaagcaacaggcatgatgttttatgcactggggaacactaatcagccctactgtgaagacactgtcagctaaatttcctttgctcttcaacttcttcacagaacatctgctataagaaactccttgtaactaaaacctgagtctttcccctctggggaattttctttaatgagcctcttgtggctacatctgtacagttttgaaatatgtttcctcaagtcagttacatcttcatcctggattctagggtttgctgtctattggacctcatagctaagatttttccttctaggagttcacaaacacaactccagagtaggttgacatagtgcccagtatctagagaaaaattaagatcatgtaaccttttatttgctaaaaagagatttttgatgttgtgatcactcataccaagatagcatttattaatactaggtgcaggtgtggttttgcatatattaactcattttattctcctcacaaaccctgtaaggcaagtgctattattatccctatttacacataaggaagttgaagaaacaatattggcttgcaactagtaaaggtcatcttactagtaaaaggcagacactgtatttaaacctagagactgactatagaagcctagttctgagccactatactctattgttctactgactgtagaactatactctatttcttctactgactgttcatatgctctcttggcagcagcaacacagattttgatgccccactaatcaatgcagatctgaagaggtgacttgactctatagtagggtcaaatataattttaagggtattgttggttgaactagtaggtttttaaatcctgttgcagatggcctagagaactgtcctcagtgactgtataacccatgctctaaagtttataatgtcataagagaaaaaaaatgtaggtaaaacatgtttacagccttacaaaaaagcattaagcagaagcaatattatgtggtacgtaccctgtgtggagaaggcaaagaaaccaaccagttggactcatcctttgccagtgtggatataagtacttaacttgcccaccaagtattttgcccaacttctgtcatatttacctatgaacttctattataaattattataaattgtgatcttctgattgtacatagtttgcattcttgtgaagagacttaatttatctaatagtgttaattttgaaaaattaacaaactttcttaaaagagagcaagaaaacttatatttgtaaaaactaatgaaagaaagaatctttttcttcctgtactaaaacaattttctgtgaacagttgaaaaaacactctagtcaggtgaagacacttattcatatgtggaatattctagaaataagccatgtgaacagtatgagtatgtgggaaaattgttcactggaatggccacaaaatgaccatgcgtgacctctgggccataagaaagcaggaatactttcctcatcaaaatctgaagttgagggcatgatcacaggaaaaagcttaaatcttattcccatggttgatgctataaatcaagtaagcgtgtatcttagactgtgcatttgtaaagcacagtgtctatcaaaatatcacaattcaacttatccaccacttgctatccccagcattttcatttcctgattgtgtgaccttgagaaacttttctcctctctaagcctcattttgctcatctgggaaggggtttcataattacagaactttcctcaatgggtttagacaaggaataaagaatgtgtgtgcactgagattagctggcacattaggtagctgctcaattctttgtttaaaggacataaagcatgatatataaatacaaaatatatgtaagcttatcactattcagttgaaaattaacctgtaaacatctacatttttatcttctttgatgattccaacagctgtctctaaaactaagtgtaaggaaacagcagactggttgtggcatattaaattataagtgaggactaatttgaggatcaaagatgctctttgggagatatcgcctgactagtaggaaaagcattagctgtctccctctgtctcatgtatttgttctctctgtcttggaaatatccttccccacagtttctgaatcttgatgtttaattgaacacaaaggtctttgagaaacacaacagggggttgttcctggtagttctagcattgaggaaattgaaatgtacattttttttctcatttatcaaagaagggcaagaatctaaactgacattttatatcaaatgaattatgaactgtgtactttgtacctaagggaacaacaactaaattagagttttagttaagagagagagagagacaaaaataggctttgaataaaacatacagtaatttctgctactgtgcctgacagtgacatggccagatacagttctattgtagaactagtgactggatgcaggctactctgaaatctttaaatgtatttgagagaccgtctcagaaaaaattaaacctaaatttcttatgttgttagactttatggtcagtgaaatagtcttgataatctaaagttaactttcagctttttatcaatgcttactttcttaaaaaaaataatagttgcaaagttttacttcttgagaaagtatgaaattataggttgcttgagagggaaaatacaatgcagaataaaaataatatatatgaaaatgccacattccatctctcctctgattatctgtaacacctacacaaatactacacactacactcatatgttattgtgctcataaagagtgtgaatcctaagatcagtgggacttggttcaaatcttaatttcccccctcctactagctgtaagagcttcggcaagttatacaatcagagtctgctttactttgttcttctgtaaatggtagtaaataataagcactatctcacaggattgacactgagaacttaattatgatgatgcctgcaatagatacaacgtgatgcagtacacatagtagttgttacgttgcacagttgtttccttccctatgtgagaagattaggcagcagcaaattagaactccattatttaatggctgctgattcctgaagtataggaagtattagaattaaaattttaaggagaaggaccctataatgtctgtgcaatatatctaataatcattttttaaataaccaattgaaaattcttgggaattgggggtgattcatgctttcttcttctggacaaagctatgtattgattaccatatttttcttcacaaataagtattccaatttatgcaatataaaaataaaagaagcgttattaatatgaatacatttgttttagacttctaaatccccctaggttcataaacctaaaagtgacaaaattccttgatattaatcccatatgctttctgatgccaatgctatactggataataattttgtgactaaattactagaaacaaataactatcactgatagcctgattacaaattttcttcatataattattgatcattgctgtggtaaaatgaatatcataatttttattctcaaatgttgattctaactctactacttataaggtgaaatcagttcttagaagtctttcagcagtttaaattctgccaatgactattgttttattcttactaatagataatgtgaaattaatggcatgttgaggtaagggatgctgtcttgtccgtttaggcggctacaacaaaatactatagactaggtgccttacaagcaacagaaaagtatttcacacagttctggaggctgggaagtccaggatcaaggtgctgacagattcagtgtctagtgaaggctcttcttcatagacagtcattttctttactctaacttcacatggcagaaggggtgagaagtctcccttgggtctctattacaagggcactaaccgcattcatgagggctacaatatcataacctgatcacctcccaaggctccatctcctaatattatctccttggcggtgagaatttcaacgtaagaattataggagggacatagaccatagcagacaccccacatttaagtattttaatgctagatctagttagtatttgagtaatttaattaataaacttgaatattatatccaatcccgttgttacaatgacttttataaccaatctgctctgattcttcaatcattaaatgactaaatttttctccactattcaaagatcacttaatttcttggtatttgattgtatcttagaatagtggattcaatggcaccatagaggaagagtccaactctaaaatataatggtttattttctacacgacctcagtcattttttgttttgtttttgagaaaggctctcactttgacaccctggctagagtgtagtggcacagtcacagctcactgcagcctcaatctcctgggctcaagcaattgtcccacctcagcatcctgagtagctggcaatacaggcatgcaccaccacatccagctaattttgtattttttttttttttttttttttttttgtagtgatagggtttcactatgttactcagactcgtctcaaactcccgggctcaagcaatctgcccatctcagcctcccaaaatactgggattataggtgtgagccactgtacccagcccctcagtaatttattttgctatttttcttgttggatacattcaacaagggataatttaatgcagtcttcctgaaaagagtggctttgacttgagcttgaatttatttattgttaaccttgctaagcatatcaatttttaatttcacaaagactaaattcttcagtgaattattttaaatgaagtcaatgagcaatattagaatcaaaaataaaatagaattaattgaacagtattgttgtatatattttaaattatttttccaattgaagatatgctttaaacaaagggctcaagcaatcaggtactcaaggaaaaagaatttaatctatgctgcctagaaactaattggatgaatatgatcgtattcaaaataataggaatgctaagaaatgctcttaggaatactaagacgaattcaaatgtcgaaagcaaaggcttaactagagtgtctaaatgtaggaagtctctgtaaggaaaaggaaaaaaatttggttggtggtttgagacataacaaaaaaaaattcttctgggcattatgaccaccaacttcagggcctctaattagtctgacaaagtgacagttctacattctagttgaacaaataatgtatctaatgaaattcaaaatcgctatttttctctgagcacagtgagctgcatcattcacagctttggggtatttcaaaattaacagaggatgacttcagtctgtctgatgtttcttggttaacaaattcactgaaattgtcttgcagagcaattttaagcaattctttaatcttaaaccacaaagagaggtggaggtggaggtgtattaccttggtcctatggatgctaatgtgaagtggaatcttttatttctcaaaatggtcaacagcaattagtattcagtggtgtctttttattctggtgcccttgacccacctctgcccccctttctatattactcctattatatactgtaactggggatattcttgcttcttttccattctaattaaagcattcttagtgaacatgggaaccatttttcatttcatgaagaataattactggacctaggtgaaatctgcccattgggttttatataatttttgacaaatatttgcacgaattttgactgatctattcttaccatttctccgtgaaatgttggagaagttttcagttccctcagaacaataaacctaaatatgtacgtgaaagaccaagataaatgttgtaccaccttcaggttgtatttgctaatgtactttaaaatattttattttgtcactaatataagaaataatgatgactttttaacaatttttttttttatttttgcacatgtttctttcctagtcagagtttgacctaaatactcttctactacactagtgacaaccttgagaaatatcatttatttaggttggatctgtaaaacctatagctcttgttatacatcttgtttcttttttttattttattattattatactttaagtttcagggtacatgtgcacaatgtgcaggtttgttacacatgtatacatgtgccatgctggtgtgctatacccattaactcgtcatttagcattaggtagatctcctaaagctatccctcccccctccccccaccccacaacagtccccagagtgtgatgttccccttcatgtgtccatgtgttctcattgttcagttcccacctatgagtgagaatatgcggtgtttggttttttgttgttgtgatagtttattgagaatgatgatttccaatttcatccatgtccctacaaaggacatgaactcatccttttttatggctgcatagtattccatggtgtatatgtgccacattttcttaatccagtctatcattgttggacatttgggttggttccaagtctttgctattgtgaatagtgccgcaataaacatatgtgtgcatgtgtctttatagcagcatgatttatagtcctttgggtatatacccagtaatgggatggctgggtcaaatagtatttctagttctagatccctgaggaatcaccacactgacttccacaatgtttgaactcttgtttctttatttttctctagagtcctttctcagagccaagggtgtcttgacaagtaaaagagaaaaaagttactaaacagagagaaagagagagtaacagactaagaaagacagagacaatttcttcaaacctctactccaaaaaatcctcctcaaaatttaaacgacacatttgtttaaaacctcaaaattcttgcattctttcaaaacactgagctgttagattctaccaacagtatccgctctccaagttagttctttaggttcctgtgtgttggatggggaagaggtagggaaaggaggctagctaccttttatgtctgtgaggaagggcaaaggtctggtttggctaattttaaacaacattgtttaaaataacaggaacttgaactttggagacagttgctagattcaaacagcagcacaaacccctcattacttgtgtggtcttgtgcaagtcatttatgttatgaagcttcagattccttgacccacctacttcacacctaggactattaggaggattcagtgtgatgatacatacaaagcatttagtccattgcctggtgtacaataactgcccagcattaactctgacattgtagtgtgcttatgtttacaaatgaatatcaagatgttagcattgttcaaggggcaattaaccaaagtcattcattaaagttgttgagttgtttaataaacaactcaattaacataaagactctttaccaaaactttgaactttgttcaaatttcattcatccaaaagcagttgctgagctctttctagccaccaggcataactctaggtcctgtgcaaaacaggcttttggagcagatggcgtgcattccctgatggaactgaaggccctggccaccattgtggtgaagttcataactgcacttactgcatgttctggctggctacttaagaattccctaaggagatattggatagatcaaggtacttagagcttggtttcaccttctagggggagaaagggttgctcttaacaaaaactaggacaataaatttaaatgtgtttataaataatgatgtaagacaactatgtcaatgttgttaaagttggctgttacttttaagtacaaaattgcatattccttatttggtgggattactgtacatagttatttttagaaatcagaaaagttaattgatttactgtgattctctcgttttacaaaaatgcaaattgttttattatataagaagagtccattttagaccaaattcattcccataaaatgaaaacttcttggaaaaacaacaaaaaagaactttttaagaaaatgtattgattggtaactcatgacatttcttttctgttttgctttttggctcctgtgaatctcagaaaaaaaaagtctgttgctactcaggaggctgaggcagaagaatcgctcgaacctaggaggcggaggttgcagtgagcagaaattgcaccactgcactccagcctgggtgacagagcgagactctgtctcaaaaaaaaaaaaaaaaaaaaaaagtctgttgcttgacaatggctaaccttagtagaggttttgtggtacagttcactgatctttttccttcattattcagctttgttttcttgagttttatattaaatgtttttaaaaatattttggtaattatgcaggttaataaattataaaggatatctatagttttccccatctctttctggcattctaatgacatgaatgcagattccttattgatccatataagaatgagctcccagaagtgagtgtaatggaatcaagtagccagaaatacttagtaattggattgtttttcacattctgcactcaacttttatggaaaaaaaaaactcgaatcaaagtatatcaataagatgataaatccattcattccttttcagtatccagtccagtccatttaccagggagtagccaccaccatctgtgcctcaatattttcaaactaaacaacaattgtagtttctgtgcttaaaatattgatggaattagtgattccccatctccttcgtatacatttcagactctttatctgtcctacaagaccagtgtctcccacccttgctgccttgcttttaattcctcaaacagtgagatcaccatagagcttccggcccataacaggtcagcaaagtcttagtcatttaacaggtccaaacttaaataccacttccttagaaagcctttcttctttcaaccaaaattaagtcggccccctttaatgatacctcttagcacctctgttctccctcctagcactttgtgtacattttaactacatattgctttctatttgtttgatgccagtcttgctccacttgacaatattctcatgcccataatggtgtgactctggctagtttgttcttcattatgcacccatcacctggcacgatgcctggcaagggagtaaaggaggatgggtagatcagtttttcagggaatataaaaatgacagcacagttttatcacaaatgtttaatctttctgtatttccatatttatagcttggagattgcatagtaaacaggaaagaggatgaggttttgaatcaaaattctcatgtttgaatcccagcctggcacttagcacaatcacaaagaactgtaggaggaatgcaatactcacatcatctaattcatggtatggctgcaaggccaaatgagaaaaatggagatgcattcaaaaggtgagagctacatgagaattcatgaacacaaagaagggaaaaacagacacagggcctactcgagggtgaagggtgggaagatggagaggaacagaaaaaataacctttgggtactaagcttattacctgggtgatgaaataatctgtacactaaacccccatgacttcagtttacctacataacaaacctgcacatgtacccctgaacctaaaataaaagttttttaaaaagtaattgaaatgttcgtaactcaaaggataaatgcttgcggggatggataccccattctccattgtgtgactagttcactttgcatatctgtatgaaaacatctaatgtacttcatatatatatatatatatatacacgtatatatatatatatatacacatatatatatatacgtatatatatatatatatatatacacatacctactacctaccctcaaaaattcttagaaatttttttaaagaataaaattagacccctatctctcaccatgtacaaaaataaaatcaaaattggttgaaaacttaagtcgaagacttcaaactatcaagttactacaagaaaacattggggaaaatctataggacataggtctgggcaaagatttcttgagcaatatcccacaagcacaggcaaccaaggcaaacataggcaaatgggatcacataggttaaaaatcttctgtacagcaaaggatgcaatcaacgaagtgaaggaacaccccacagaatggaagaaagtatttgccaactatccctctgacaagggattaatcaccagaatatataacaactctataggaaaaaaactaataatccaatcaaaaaatcagcaaaatatttgaatagacatttctcaaaagaagacatacaaatggcagtcatatgaaaaggtgctcagcatcatcaattatcagagaaatgcaaatcaaaactataatgagatttcatctcaccccagttaaaatggcttatgtccaaaaaacaggcaataaataacaaaagctgtcaaggatgtggagaaagggaacccttgtaccctgctggtaggaatgtaaattagtacaaccactatggagaaccatttggaggtttctcaaaaaactaaaaattgagctaccatatgactcagcaatcccattgctgggcatacacccaaaagaaaggaaatcagtatgttgaagaaatatcttcattcctatgtttgtttcagcactgtttacaatagccaagatttggaagcaacctaagttgcatccatcagcagatggatggataaacaaaatgtggtacatatatacaatggagtactattcagccgtagaaaagaatgagatccagtcatttgcaagaatttggatggaactggagattattacattagatgaaataagcctggcacagaaagacaaatgtggcatgttctcatttatctgtgggatctaaaaatcaaagcaattgaactcatgggtttagagagtagaaggatggttaccagaggctgggaagagtagtggagggttggggagaggaggggatgcttaatgggttaaaaaaatagaatgaatgcataagacctactatttgatagcacaataaggtgattatagtcaataataacttaagcgtatatttttaaataacttaaaaaatgtaattagattgtttgtaactcaaaggataaattcttgaggggatggataccccattctccatgatgtgcttgtttcacattgcatgcctgtatcaaaacatctcatgtgccccaataaatatacctcctatatgccacaaattaaaaaaaaattaaaaaattaagaaaaaaattgttctcaagtgattaaaactaagatggctgggtaatttaagctctgtattgggtataagcagaacatactttttctaaaccttgtgaattttttaagtggttacaaaatattataggatcagactttgtaatttcataaatattattattacaaataatgtatccagagcgatctcaattatgaagtcatcaaggatgggtaagaaaattacagagagaagcaataaatctgaatgtacagtgcttatcttcaagtaacttaaaaggaactatgaacaaatgttcatagttttttgggatacattaaatgacttagtgatacttaagaagatactttgattgatgttactaagaaataataaatgagtaaagcatgattgtagttatggtgtgagtaatgatatgacaggatcatgtgatagacattgggggtaagataaagatcataacaatagcaaacacttatatagtacttatgatgtgtactttattatattatgtatatattatattgtgtaaccacttgatacattaacttatttaatcctcccaaccacactctatgaaatatataccatcttaatctttctttcgttgatgaagaaactggggcacatagagattttggtacttgctcagtaagtagcacaatcaggatttgaacccagataagttggctcttaaccaatacacagatctgcctcttttgtgatttaatcaaaataaactctaaataaagacattacaataaagacattaattagctgctaatcagctaattaagttaaaaatgtaaaaagtgctaattgaacataaaggagagtgacaaaagtgtgaaatgttcaggattatctaatataataaaaagcttatcaaaggtaaaaaagttttcattggaaaagattcatgaacaagcattctagaaattaagaaatggtaaatggccaataagcatgttgtaaatatttcaatcatagtcttttggttttcagtgctatctatagactgacaccttccttatgtatatgctcaggcctaaacacatgaactccagtcccccgtagtcaatggccttctaaaaatatcttaggcaatccagaaccaacaaattttttttcttcctacaccaagtgtccctcccttagaccagaagcttaggagtcaagcatccttctttcattctctacatccctacatctgttccatcaccaaatcctctatgaacaatactttccagactcacgtcaatgaggcttctgccttgggtctgcttcatttgtgcttctcccagtgatctgcaaatctcaactcagataaaacctcatcagagatgccttccctgcctatcgcatctaacatgctaactttgctccactccctccctcatcactctcaatgcccttatattagaaatgcttctttttttctcattaaatgttagtagactttatttttaagagcagctttaggttcacagcaacatcgggcagaaggtgcagagttcccatttatccttgcctccacacgtgtatacccttacccattatcatcctcttccacagagtggacctccactgacatgtttttattacccaaagtccatagtatacactaagattcgctcttggtgttgtacatcctatggctttaggctaatatataatgacatgtacttaccattatagtgtcatatgaagtagcttcactgctctgaaaagcctccgtgttccatctattcattcatacagccctcccccaacccctggcaaactctgatcactttttatcgtctctatagttttgcctttatctttttttgtctttcatctcacccctcttaataaaaaccattttaatttgttcattactatattcccaggttatggaatagtgctaggcatataatagatgacttttaaatagctgctgagttaatgaattattatatatatacacacacatacattatatcagtcatatgtaattatatacaaattatatgacatgtagatatataatatatttaatgatatacttgtattattattatatatgtatatatagatatatataggcattatataaaatactcattttgatggggatactgggaagtggaccactcatatcttagtgatggtagtataaattcaatgttctggaaaacaattagtcaactaatatctgaaatagtagagcattcatcaacgtttacccgataactctaaaaagtgtccctaaagatgcatcattctgtatccatcaatgtcagctttgttaagtgaatgttccacatctataaaaatagtacatgcaattatttgaaaagttatgctaccaaaaatactgactggcatatatagtaaagcaaataaagtttactaaataatatgtaagtattcatcttaatgtttttcttaattatgtgcacatatatttgtatagaaaaaagacaggaaagattatctataataattttaccatggctatctctgggtagtgtaattatggatcattgttttcttcatttgttttataatctttaaagtttatatcataaacatatttgtacttaggaaaatacagatagtacttttaaaagagttctgtttagttctccaagaactaaattttatcatttgtttaataagtatttcatgagcaatactaaactctcaaaatttgttaagtgctctgaagtttacaaagataaataaaaagcatatctgctctcaaatggtttatgttatcattaccttggtttatcatgggacaaagcaataattagacttaaatttaaaatttaatggggttttgggagatgaactatggtcttgaaaacaaaagggacatgtatgaaaccacaggtttctatctactattcattgagacgttgcttagccttttctaaactcagtttttatatctgtgaaataagaacattgagagaaacgaatgataaaatgaatgtactctaaagtagtatttcagatttcatttgataatacctccaagcaattaatctcacttatgttaaaaatatttttcacatttttttgtaatttatttgtaaatagaaaatatgttcgggattctaacaattgttgggataatgacagaaataattttctctgcagatctttcccccatcaactcatccatctttcccccatcaactcatccatctttccaaccattgattcatccatccattcatccagtttttataggatctttcctagacaaagcactgtgttgggcaccatggtatctctttaattacttttctcctttaacagtcctttaagactatgtatacattagaaaataattaatctggtatggtcagctatctatatgaccattttgagtcagctacatagctgatatgaatgaacttgatgaactccaatattaagcaggccaaaattaagatgctcagtgaagtttcagcagcatcacttgaagaaaggaaagtcagtgccttcctgtgttgggctgtggcccaaacacacaaggagtgtaagtttaaaaggcattctcaaactggaacacatccaaatcagttaacaaggctagaagatggttgagaaaacatactatatggaaactagttggagagaacagagatgtttaacctgaaatggggaaatttagtggaaaggaaggcaaatgcttaaaaatacctgaggttctagcccacgaatggtaccagaggcttgctctcagggattagaggtaaggttctaaggagttcagtgttgttagcatgaccaaccatatgcactttttgcccaagatagtcccagtttatgcctgctgcatgcagctcagttcactcctattaattacttagagtgccccatttcactcagaatgtctcaatgtgaacaaaaggttatatttgccctaagttttgtagaacccatacaattctttgttctacatcagaaagagctttccaatgataaagactattcaataatgtgatgggacaacttgccaagtgactattttcctgtcactggtaaggcacaagcagagacctggggtcacctgtctgggatgttctaggtaaggattccttatttggtgagaggataaagttggtgacttttaagttttctgccttctgattttaagattctgttgttttgtttttgaatattctatggtcaaatatcagttccatgacatacctacgaaaacacaatttttaaaatatactctttctctcgctaacatgaagacttctccattttacatttcattgaatttctgtggatgttgactaattctggagatgtggcaaattcatactagtagttctgtgtgtgataccttgtggaatgatgggaatccctgctatgataaagaaataagaccgggaggtactgtttaagaatatgacctggacagaaaataaatccaacatttattgaaatttgtttatttaatattgtaaatggtttgcttttatatagatttaatatatttaatagttattctatattataaatcattcactatagcaggctgtttcagggtgtaaaattaagagcgcactgcctttgaacttaaacggcccatgttagaatcctcagtgtgccagttacatcagttctgcgatttgaaatgaaatatttaacttctctctgagcctcaccttattccgtatatcctacaaagagaaaacactacaattttggagtgtaattctgaggattagaaataattatgttaaataaccttgtacacagtatgctttcaaaaagttcgctctggtgaaagactgttttgtgaacatgaaatctattttaacctacttgtcactatttaatgctgctctgtttgtgcatccttgtgttcaaggttgactgtccatttgttagcacatctgcatattcctcataattaatatctttttaaatgacatatggtttagtgactggaaatcgagtcttgccttctgttttcaatttgttcatgactcaatgactcaatatatgtgtctgaactttaattttccattctggaaagtagaatttaaaacccttgctcatatgtagctatttcggaaaatgatgaagaaatgtgtaatccaaggattttgaatatgtgccaggctattcagcgatgcagcatataggtaaaaggccgcagtttctctaatgttaacagagaagcctaaatgagaatgccaaaaatgtaatccctgaagtgaggggataatttggggtaggctagagtcagattcctagtgaattagcaagaagcaccacatctaaatggaatgagcacaggaagagttggtgggagccctagggaatgaggctgagaacatcattaacctggatgaacaactgatagtacccccagggcagtgcttctgcaagccagggatctctgaaagacaaggcccagtgcacccctggaagtgagtttctaacttccgagtcccccgtagcatttatacctcttttgtgctgagtactctttttttggtgatacagttatttgagtcaggtctaatctgttaaacataaagtagattatttgattccgccttctacctattctgccctttccctgcctctaacaagaaccttgtgcagagtggtattcagtgtcttgtattatagaattgaatttgatacaaaatattacaggcttatttgatattttaatgcagcattttatttcactattttgaaatgcacacacacaggcaaaaaacaaaacacacctcaaaagtaacatgttggtgggatgtcctgagaaagaattcagtgcatatggaaagcacagtgaattcattttctccctaaaatattcttcttcttgtccccacagacttggtagccaccaactacgtttgtaaagcctctgtttttgcctttgagagctcactcccagagttttataaatctgcagggagcaaaggtttaggacatgtgtaaataaatcattttatattttttcgtttgttttattttgttttgttttcttagagaagtttaggacatgtataagtcattgtctatttggtgttttgttttcttttgtttttcatatagatgagagtccagtggcgtatatcatttttaaagtttaataaaattatacattcaaaagattataccatctcaattattccaatctgtgatttaatttattgcttaatgttttgtatgaatttgattttctgaagcaggttaaatttgaaattttattaaaaacccacttcctttgagtttatagattgggatagctgttttatctagtcgctgtgtagaattagtatttactggacaagatgtgttgattcaggaggttgtcttggagtgtttgccccgtgagggtcatattaaacttgagagaagttctttgagcaacagagcatcttggagacaatatatcaagctgatggatacagggctcttctgttaagaaaccagcagtggaattatggctggctcccagttattgctttggtgctaaggagcctctaaggattaaatctaggataaaaggggttaaacagaggggaaaggaaggtttccagaattcagtgttactggaagcatacagaatgagtagttatatacaaataatttaagatgaccattctgtttggaaatatttcacaatttaatatattcaaagtgtaccaatttagtggagcatattgttttgttattactcagaagagaattcgtgacatcttattattattataaagcctactttggggcacttcttcctactgtcttaatagaaaggtaatgtagtttttaacacataaggggttttgtgtgcatattaaaaactaattttttcagggctaatgacttgaaattcagaatttggattttcaattacattatactccttgatgtagaaaaattagacaaaaataatcaaaagagagacatggttttatatgttatacattgtatgcattttgcactttattttttgcctgtgttttcacagtgctcttttttctatgtatgcacttattataaatcaattaaagtatatatgtcaaataaattatgattgttaaaaaccatttgtgttcatagataaaaatatcaattaaaaagcctttagcaatgaatgtccttcaaaccaaaaatgtgaaggtaagaagtggatagttggccctggacagcaatcttcttgcactttctagtcatgccacacttttactaattgagagaattatttcatatcatttcctctttcttcaagcctccatttcatccacccaatttgtcactgagcctttgcttttattttgctcactaagaaactgcgcatcatcaaaggagatctttgctattattccatcactgaatctactcactgctctacatcttcatctgtgcattcacttttgcacaatgggagaactatccctgctctgtttggcagccagtgtgcactgactctcagttgattcaaatgtgcactggctcacctctctcttcccacactaggactttgctctggcaattctttcttttacggtatcatttcccctaatctgtgttagattcttccaacaaacatgcctatatgctgcaacatcttccagtctttagaaaaccttcctttgatatcatgagcttttctagctgctgccccattttctaatcccttttagaataaattccctctaagtgttgtctaagctcactgtatctgccctttaccccctcgttgtcttcacaaccttagctcagactgctatgcccagcactgcactgcatctgctctttgcaaagttatcaaatatctgcacttggccaaatgcaaagtttcaactcccagtcttcttcctccttaaactctcagccgagttgatacagctgatacgttcttcctttttcatgtgccttctttctttactcggcttccagtctgcaccttctcagtttttctcctacctcactgaccattccttctcagtatcctttcctagagaggcctcctcctgacctcaacattttggtggattccagggcttggttctcagacctcttctatactcattctatcaacactcacttcctagtttatttcaccatctcagcctttaaagatcacatatatgctgacctacaactcctatgaaggctacaactcctatgaagacttttcctctccctctcctccttagtccgtgttagccacactgttccttaaacacaaccagaatgttttcctccttactgcctttgaatgtactgctatctctggctggattactcttcctccagacattcggatggctacctccctcatgccagtgaagtctctgttcaaatatcactgaattgcattttcttcctataatcttcccatcgaattgaagttgttacctagtaactaaaactgcccaattctttttaccttctctttccttacactgctttatttttctacaaagcacttatggccacctggtattattgtatacacagtattcatttgtttaccacctgctccctccacttgaatgtaagctacctaggggcaggagtggtgtctattttattcagtgctgttcttcttccacatgaagagtactgcttagcacagagtggagccttaataaatgtttattgaacaaatgaatgaattattaatgaactcaaacccattacagcagattgatgaaacatgtaatctaattcttctgttctcatcactggtcattcattagcctcattgttcacagacagcttcttctgaattggagagtatgtaaaattgacacactacacaaggttatgtataaaataaagttgaaaatggaccctgatatttcatttgttctcattattttgatcacttctccttcttcaccaatggcctctggtaatttgtggtcattaggaacctatattacaataatcagaatgttcccaacaaagtatattatactagcaattaaattatgctaaagaaagttcaggtcagtccaatgtaataatagtaataatagttagtgactaataattaccagggtctaaaatcaggtgctttatttatatgatctctgaacttcacaacaattctataaaggaaaaatattatacctactttagagatcagaaaatataggctcggagtcattaggtcattttcctaaaggcagagttttgctgaatttgctttcaagtttctgaatagctttggaacaaactgatatgatttggaacaagctgatatgacaggctcatttgagttataccagttggaaaaaattaattaaataaccagagtcatcttatcaactttttttagtagaataggctttagttttacacattcctgttaggccttctagaaccattcaaagagatttccctggtagattgtaccaagcaggtatgttgaagtcagaacagatttgccggagactcaactagactagaaaaagtggtatgcatgttccaacttgcaaaattgagtaagggcaggagaagggataactctgagaagggtaattgtataaaacacatagggaaaaaagtttactttttatattttcatgggtgagcattaaggctggaatacactgtattcagccattcatgtttatttatcattccagaaaaatacaattttagctaacttcccttcctccaaaaaaaaaaagaaaggaaaagaaagccattgtgttcacatgtagtggtgtgattaaggcagcaatggatgatatcggggggaagaatatgagatctggactgcttcagtgttcaattgtttggtctgttgaacaaagagttaaatgaaaaaggtactttaatatttgcttcactaaattccctccatgttttcaattagataaacagaagtacaggtgggaatgtgctgcatattcatttgtcttgctgtttgggggccggcttttaagactgaaatactaatgtaattgtgttgaaatgaacaataaggaagtacaggagttcaggaatgaaaatgttaaattaaatggaccatgtttaacattgttgttgatcctgaggaacagtttttccagtatatggagcatttcgattccatccagcatatgttctccacagttttctctgctctaattcatctgtgtttttcgacagctccagatggcgtgctgcctcccaggctttcatctgccactccaaccagtcttcaggttgtctggtctacaccagctcgtaataacgctcctggctctcccagataccaactccagatgaggtctggcgactccacccatggatttctagagtgagcattctactttgtccattctatcagctgggttatacaatatagacataacatttttgaagagtaggtcagttctcatttgcaaaaaatataggttaccttttaaaagtacaaaaaaaccccaaacaattagaggataatcatttgctttgcaaaaatatctatttttcatttatgtagcatttaaagtaggatttcttcccactgaaacttttcatgagcacatgcattacataaagcaatgaaactaacaaaatgatgtctgaactgtcgctaacaaattataatacctattctacaaatccacatggcagtcagtctcaatactactaggatttacatctcgtataaacacaagattacagactcagccaatggctacttattttaaaagagatctcatttgatggcagaaaattacaatacttaaatgtatgttgacatcctctaaaatttttttgtagtaagaaatttacttgcttttatttctttgaatgtcgaaaacttcctaattgacatttatttcccatacaggttattttccaatccttctgcatcgttaagctatgaagtgagtgatctccaaccgtacacagagtatatgtttcggttggttgcctccaatggatttggcagtgcacatagttcttggattccattcatgaccgcagaggacagtaagtggtctgaacaatacacagccaaatgtcttctacatagggagcttaaaatgtcttcaattttttccaaagcaaagaaatgagcctcccttatttacttgttgtttagtgacaataaccttttctagggcaagagagtgagcaaaggtggtcagtctctccagaaagaagaataatgtggtcttggagggttggagggttaggcctacagacaggacaaagtaattcactataaattatgatatggccccattctatccttcagggtacatcttagcgccctgcaagagaaaggttgtcatcttctgctttatgactgaatgttctctgtttcggagaaattctggcaggcagaagaaaatgaaatatggaccttacttcatgaggctgcttacatatacttgttcctggaaacaggtttcattttcctgcttctactcataccccaaagacagccttcagcatagagaagtataatctgatagcagtatattacaaaaggtggattaagatttctttattcaaccaataaagagaattttctagttgttcactaaaaagttatttttgcatatatttgctagattatatttgggaataaatacatgactataacatttggttttatacaaattacctctataaaagcatatatatgaaagtagaggggtttttaaagaaaagttagaaattaaatcaagctacacagagtgaataaggacattgtatctttgaacagttaggttttttgagttaatcttgtgaagtcttttaatcataggcttcttaggcaatgttctctgctggcccattgccatgctggctctatatccaatgagaacgttaagtgactttcaaaagcctagatattaacacaaaagtatggtatttgcaacaatatcaattgtttattaaatgtattgttttatttctataatacctttaattgcattattttagtgaagataagacatcaaattagacattatcagtacaatctatcttgtttaaagttgactttatttttacaaaaaaaagccacctttatgagcaataatgtatgttacttaattcatttcttccaattcgtaattactccctgggagaaagttagctactttgcaaggggacactcagtgtttttgttctcaagggtatcatttagtaaattatcagcacagtacgataaatggcacccaaagtccagaaagcattaattcaccaccttttaggaggaacattacatacactctggggaatctggacaccatgatcaccagatttatggactgaagacttcacactcaaaatagatttttgaagaaacatttgaaacaactgaagatagatttgtaatctccttcttatatatagcagcatgcttgatggcactaaataaagattagccaaaaataattattcaacccactgcagaggtgatggctcaatagaatgcttggaagaagggagaaagcattttttttttggcacagcattctttattctcctagagaaagggcaacactcaaacttcctcagcggtaatctccccacaattttcactgaatgagggccatgacctgccatctataggcagggaggtagcacataaataagcaaaagtccaaaatattgtaaaataccaattagcatagcatcctttgttgagcaaacttacctttggtctcctttttactataaaacaagccttatagaccacacatacacatcgttagaattttcatacccagagaccctccattgttgtggtatttagggcttgagtttaaagtgagtggtattaacccttcattttccttaagtaagaattagtaacacttgaataaatagcaggtatcaactcataaccattatttgtgtttaaatccgttccccaaaatgaatgaactcttccttcctctgctttgtgtatacactgtgaagtcacatacatagcaaagaactggaaggaggccatgtgtacctgcaggttacgttagcagtgcacctgagacatggtgacagggtactgtatattttagatgtcagtggagatggatgccatctctgaaaggatatgcaattgagttgacaaagactgagtgattggcattgggcacaagcagtttttctgtcaaggctacaaagcattgcttataaaaccacccatgttgacagctccatgccagaatcacacttcttacttgatcctgaccagcacctcctgctcaccaaagtgcaattttctttctctttctttcttctttctttgtttctttctttcccctctctctctttcactttctttctttctcactctctttctctttctctctctttctttctttctctttctttcttttcttcctttccttcattttttgagacagcgtttcactctatcgcccaggctggagtgcagtggcaccatgtcagctcactgcaacctctgtctcctgggttcaagcaattcttctgccttagcctcccaagtagctgggattacagatgcccaccaccacacccagctaatttttttaatatttttattagagatgggtttcaccatgttggccaggctggtctcgaactcctgacctcaggtgatccagccgcctcagcctcccaaagtgctgggattactggtgtgagccacctcacccaacccaaagtgcaattttcaatgtagaaatttcacatatcgtcttacagaacgaaacagagaagtcgcctcgtgcccacatttaaattccataccatcaacaggcacctttctgcatcagccacagcctcacagctttccagtgccaaaatgggtcaccaatggcaatatttttagtgtgacatttcaagacagtgattttcagcaagcctgtgacacaggtgaaaccacaaagagaaatctaggcaggcaatgagctacagccagagaagcaaatgcatgggtgcagagaagttatcatggacagggaaacaggatgtgaagaattttaatagatttttttttcaaataatttgtcatttacaccagtgtgccaccaatatccagttccatgcatttttaaaaatctagtgtgctgatgccaaataatcataatgcacatttcctatgaatattttaaatcctgttaaatgtgtgttaataaaagatgtttgttccagccaatttggtcagtgtagtgtttaactggttgcaaccagataaatacaaacaacacattattttttaaatgtgctgctggcagtccaagcacctggcatgtccacagcttgcaaaaatgtcctaagattatgttaggcttgggagcatgtgattaataaaatgaaggcacttgcctagcagctgaaaatgttgatatcttgaaaacaaagataaccatcactcctgattatatgattgttccttctctctcgtatgtttgcaattgttttctgtatagtacatgcatgtagaaattagagttggcagggagggcaagtttttcaaacctcagcttaaatgtggatgtattcttttgcctaccgaaatcctgccttgtgttaactatgaattaacctactttttcttaaaattgtggattccccagcccaaaaaagttagataatctgtttctcttaagatttcccaggaaataagattgaaatatggaatatctaatttcagtcattttaatgacaaacatatatggcatacacaagcaattagatcaactaatgaaattgaaatcattttctaaaaatcacttccctaccctcaaaaaaaaaaaccccaaacttgaattcactttagattttaacaatttagttgtcatatatttaaaaatgtttgatcgtttcccaaatttgtagtttaaaattccatatttatatttttaaccactagtctaagaggcactactgcataaaacctgtagaattcgaacagtttattctgtaggtttacttagacaacttttcatttgttcattattttgatgacacagtgatattttaagtacagttatatgctgcacaacatttcagttgatgatgaaccacatatatgacggtggacccataagatgatgatatcatatttttactgtaccttttctgtgttgagatacacacttatcattgtgtgacaaatgcctacagtattcagtacagtaacatgctgtacaggtttgtagcctaggagcaacaggctataccacacaaactagctgtgtagtgggctataccatctaggtttgtgtaagaacactctaggatgtttgtacaacaatgaaatcgcctaatggtgcatctgtcagaatgtattcctgtcattaggtgacacaagactgtaccattgccatgctatatttgctcattgcattacatcttgttattttttcacatttataattgcactgtgaacagaggagagggcaatgaaggaaattgtcttactgcctgggtcctgctttacttttcccctcagcaaccttcatccatccttcagatactcacagtaatttacaaaggaacagaggttcttctggagtaagacagaaaggcaatgtgaggtcaattgaaatctagatctaacagaacatgcttcttcctcttttgttgcctgacataattctacacattcatcaagccccagctcaagtgtcacttcctctgtgaagttttccttcttgttgctcccttagaattttggtttgtgtttactagtgaatcatcaatatccccttctgaattgtaacgtctcaagacctagggatctgtctcaactatctttctatcaccagtgtctggcgaagggtctgatatagagtaggtgccccaaaattcttactcaaagtactgattaaaagcagagtttgattgaagtaaatccacaaaaactcaatcaagcaaacatttaccgtgtacctactgtgtaccagggactaaaagagatatgaaagttgcaaggatggatatgatactgtttttcccttgagatttcctctgtctggcaaggagcacacacagtaaaaccatagttagagtgaaagagctgagttgtccatgagagcaagctcagaggaagggcatggcccctcaacatgagggccaggaaagcctacccagagaagaccaggagaggaattggaaatgatttatatttggagtgcactttaatatcaaagttcaaatttacaccatctccacttgttcagggtaaggctggaaagcaattgctgtaagagagcactgacatatgagacctgaagagggactctcaggttgtcctgtcggtcgttccagcctctgagtatgaggcgaggagggtggggacaagaggtgaatgtaagagagggacatcccaaaagtgattctcatttttttaccttggtcagaggcaggcttctggctgtccctctgattcaatattggctgctgtcttggctaggttaacgaatgttctagttagagaggcttctgccagccccaaatcatgtgctattcggaatgaaggggagggatgtgtagaaagaattctaaaacaaaaccatttttcctgtttttattctcacaacctgtaataagagtaaaatactctgagaccgtgtaacagaagaggaaggaaacatgtggtataaaatttgataaattgatcaagataattctagagtaggacttccgaatcatttaagtgcacatatgcccttaagattactgaaattttaaaactaatattgcatgacaaacatcttatgtttagggcattttagaatttaaagtttcacttgcatccttaaaatcattctacgcaacacaaggaaaatcggaatatttttaaatgagagtggaacatatttatatgagtacattttatttaatgaagaaagaggaactacaagtttcagtagtgctacacaactattttgctttctccattccaaatatttttccagttgccttaagtactaacctctgattgctgacatgtttttcctttcaaacagtaattcaggtatctattttgcatagaacagaagacccatgatcaaaaataacatttataatcttctgattttgagagcaaaatggttctgcatgttttcactacatactttgttttctgttgcatagattttctccacaaattcctgaattttcagaattaacaaattcaaatatttacaattatttttatattttatttttataatgtaagatcaaaaggaacttattcaagccaaaaatgaccaatacggaatcctttgaaaggatggattgattaatcaaaaattctatccaccttgcctcaatttcccacttaagctctcgaatctcccctgggcacttaaagcacactcctcttccaaatatagagtgcttgtaatgtctgtgtttcttacagctgaagactgcaggtgaaagtaatgaaaaatcaagttttttatgtttactttaagaaattaatgaaaaataattttatcatagctgccttattatcactacttaaattttattgagggtgtattatatgcaagacactttagcaggaaaagtatatcctctcattatccagaaatgctatctgctggccttccactatttttaaaaactattcttgttctttagctttgaaaaagttaaattgtcaatatttgaaaactctcagtggactatgtgagatcattcaaagataattgccacaggttgatatttaatggcatgagtttagttttaattctcaaatcttaaattcttagagagtcaagtatctaaaaactgctggttattaacaaaaagatggatgtttaccataatcattttctatagcattttctatagcacctgcctataaaagaacattctgcaatgctaaaacaatacatagattcatttaatcttgttgtcttcctcattttgataatgtacctgtaaacagagttgatttgctatatttggaataattcagataagttttgcccaaatataaggagtgaatgtgatgacctttaggttttttaggatgttttcctgacttcatgaattctcacatcaatgcattttattttctgcaccaaattatcgcagatgcatctactacgattcaccccacaatatgccccagctctagaggttgaaacattctttctaaacaatactctcctgatatcaggagaaatagagaaaaatagttcccgaatattggttctcctatttgcaaactatcaaataatgtccttccaattccaacagccttttagccttcagaggtttctttcattaaataatgttacttatgttatacagcccatttccttttttatcagagtcaggctgaaagttcatttttctgcaaaactgcagtgcccattcttaatttttgttttgagaaataactgttgtaccctctttattatcacaagattaataatatttctttattttattgctcctcttacatttggatcttttattatgagctgtcaaaaattcttttgggaagtagttggggtataaataataaatcgataaaagaattcatgattaaagacaagatagaatccattattctgttaacatatcagtagtgaataacaaaaggctacattgacaattagcatgcaatatattgctttatataattatacatccatatatttgccactttgatttttaattcactggtaaatttaggggatactcatttatggagttaatattaccaaaaagagtttttaaactgagcgaggctttaattagaatggtaaaatattgcttcagggcaacaatgagaatgtaacaagaaaactgactgatcagtcatgggtaactcgaatagcaaacaagtagagaagactcacaaaaccactgaaagttatatacacactcaagttgtgagtcattcaaactgggtattcatacacatgtatacaaatacaaacaagtgtgtgcgcacacaccctttccaatatacacacctgaatataaaactaaataagcagattcctctgttaacaattttattactctattttaggctggggctgaacttttgaagctgatgagcaaaatagtttcccataaaagataatttcatttgccaaaatgaaactactttccgttattaatgttgcaatgaaatggtttgaaatatgagtctgtgatctggacagaaaggatgctcctgttcccagctccaagagggagttctctaaacaattacacccacggagagcgctgtaaggttgtattttcatcaccggccagctgagctgtgtgcctgtcatactcccagtctcccctccagtgacagccgcattgacaacatgttatactccacattgattttacagttaaggagctgattgtgatatatagagattttaagaattcagctgagaggctgacttttgccttttatcattccattaaaattttataaccatctttttcatgtcatttcatccatgaattcttactttagaaagtgatagctactgctgtgagcataacttttctcatgttcagagctttttattgtattagcaaactaccccaattatagttattactcatgttttacataattgtggtggccctttcaaccatgcagttgcaggccagttgatttgtatatagaattagatgattcggcttatcattttaaagcactaaattgaaagagtgccaggagtcaggttttaacacttccctagccaaaggagctaattaagctgctttcagcttcctctccagaatcacacaagttaaaggacccttctgcaacaagagcagcgaatctactcagccagagcaggaagctaataaaatgtatgctggcttttaagggggaaacaaatcatgaaattgaaattgaacacctctcctttcccaagataagagatcatctttaagaaaaggctgtgtattgtgggggtttgaagtgcaagttcatctcattatcatggatgtttcacccataatactatcatcatatgcaggagaaataaaagccttatcccccaatcacagagaacaaactgcatcattgttgtttcttttccctgaagatgctcacagtttgatagttcacatatgaggaataattatgcaagacccagatgaaaaccctaataaaaaatattctgatttttaagtgtatattactctctttggggaagagagggtgagataaggttagacattaaagacttgaatctccaccattgattttacgaaacccaatctcaggggatttgggggtttttttagatttcaaaacaacattgatatcttacaagactcgtacttgcttttctctgggaaatagccaaatctagatgacaagcataaataagaaaggagctgtatccccattttgatataataattgctactgctactgtataccagagagcaaaagtaagaaatggcatagtggttttaagaaagctttaaaatgaaagctaacaagagactgaaacggaaagtgtgatttataccatgactgctggttttagggttttttttagggatttctcttcaaataggatacattaccaaattgtcagaaatagcttgatttcagagttagtgcactataacatcttttgcttcgaaaagtgattatgattctaccatcagtccagttggtgacaaatacgtggatcctgttgtgtgaaagtgtactcatataaccaactattattgcagtcactggccctgcaaagcagtggttgcatttaaaatttcaaccttctttgtaacactgaatcgcatacacacactcacaagatcaacgctgttttaaacaattactaaatccaagtatatcttttttaaagattttcaataaaatctaatgttcacagaaaaatctcataaatgtcaaaattgctgtgggcagaaaaggggggatacagtattttcttgatctgttttagcaatttatagatttcaggccgtggtttataagaatgctaaatgttctggaattacagctgttactgatcagtgattgagccagatttgtgttattgcaccatgttcttgcttgtacctagagagcagtaaagcctcaatataataaaaagcacctgcattttaaatgaaatttcaattgaaaaacttaacagcccttcaaattgcagaatttaacgcagcccagtaaagcttaaataacactttgcccccgcaggctgaggggtttgcattcaaggtgacttgattgtgtcgcatggtgaaattatttacaattaaggaatttctctggagggctgcagaatatttgctgttccacaacacctatgcaggcatatggtgggcctttttcagtattcatggagcctcctgaacctttatgataattgaatcagttagagtgctgagtggagcaagcataaaacctgttaacctaaaggtcagatctgtgcattgtttatttatcagtaggtgaaagagctaaatcggcagcttctgtcacagccacagtaaaaaatcgcctataatattaacagggagtagataaattgcaaaacatggattagaatgataaacagaaccaagtataatatagaatatataatgagagatgctgaaggattttactgggctgtaaaatatgcaagtttgttatgatagtgttattgattataattagttactggggctctagaaaaaaatgtaggggaagctagaactttagtaacaactaccctcttgtatgtttattaaatttatttttttaaatcctcattttttaaccaatggcttgaataaaaagacatgattttgataaagctgtcttagagaggaaaatgatcattttagtttcataatattcaacaagtatttcacacgcaaaatttatgagcaaagcaatcacagtccttgtctttatggcacttatttatttacttattggcctttaccaagtgttcattttcatatccttgtagcagagctatcactcattttagctttgaggagaggtgggacatttccaagaggtctgactttctggatttattttactttacagaacctggacctgtagttcctccgattcttctggatgtgaagtcaagaatgatgttggtcacctggcagcatcctagaaaatccaatggggttattacccattataacatttatctacatggccgtctatacttgagaactcctggaaatgtcactaattgcacagtgatgcatttacacccatacactgcctataagtttcaggtagaagcctgcacttcaaaaggatgttccctttcaccagagtcccagactgtatggacactcccaggggcaccggaagggatcccaagtccagagctgttctctgatactccaacatctgtgattatatcttggcaaccccctacccaccccaatggcttggtggagaatttcacaattgagagaagagtcaaaggaaaggaagaagttactaccctggtgactctcccgaggagtcattccatgaggtttattgacaagacttctgctcttagcccatggacaaaatatgaatatcgggtactgatgagcactcttcatggaggcacaaacagcagtgcttgggtagaagttaccacaagaccctcacgacctgctggggtgcagccacctgtggtgacagtgctggaacccgatgcagtccaggtaagatactgactattctctctcctttgcagacttaggaatgtaccctggattgactctgtgttgaacagagccatctactgactaaacaaacgcatttgttgttttaggcattcactggagaaactgggttttggcctttggcccaaactatcttaaattcgatgtcagtttttcatttatccctgtatccccttaattatattgttgagatgcttccatttgcctcgcacacctgaaatattttgaatgccacaatgatgcttagcttaaccaccacgtcagatttaaatagatcagaaaatgagaagagatgggaaaataaggaggaatgaattagcatattaacaaaattttccattaccaatagtctggtattttttaataatcaaagaatcaaagtaatggggaaagaaataaaaatagcatattaacgggctatccagaaagtgttcaattattcacctcattctattgggaatgaactctagtggacaggataactaccattgttttggctggcatacaaacttcattcaagggaaattagtgtaaccaaacaggagggagttttgtagcttagaagcctcttttgtgtaaatacacacaggcttccatggattcagtcttgtactactgccaaaagcattggtacagtagcttgctcaccggagcacaaaacaaaggacatttgcataacagcaaagttcatctgctgaaattattacttggatctatgttgtgtgttctctctcccccaccaaaagcaaacactaggtgatgctaaacagtgtaaattgttggagaaatttaatttaacctacaaattaaaagctatttttaaaagtctttgttagttttaatatgaagctggtcaaagcaacacacatttttgatataaatatgtgtatagaattccattcattaaacactaatgggaaattaattttaagtacacgatatacgatgtttattgtatgaactgagcaatgtaaagaattgctcttgattcaaaataaaaacaaaaccaaaaacaaaacccaagcatagagttaataatcattccagaaatgactttttttttcaatcttgggggagttttgtaaaactttggtagcagtaccaatcactatgatgcaacaaaacaaacacagtctctttacaaaggcaacactacataatggacattgttctggattatttcgaataaaaatcttataactaggcgttactgattgtggccgatctgaaaaagagtaagtattttcaggccgggtgcggtggctcacgcctgtaatcccagtactttgggaggccgaggcaggcagatcatgaggtcaggagatcgagaccatcctggccaacacagtgaaaccccgtctctactaaaaatacaaaaaattagccaggcttggtggcgggcacctatagtcccagctactcgggaggctgaggcaggagaatggcgtgaacctgggaggcggagcttgcagtgagccgagattatgccactgcactccagcctgggcgacagagcgagactccatctcaaaagaaaaaaaaaataagtattttcagaggaggaactcagtgtacaattctgcttgattcagcatatataaacaataattaaaagtatcagcttgcctggctttttcttcacatttttaccctcttttgattttgtaatatcatccatgaattaaacaatatacatggcttgtcagcctgctagagaagtttagattagcgtggctagaaagctgaatctcataggcactcacctgaggccacaaggcattggtaaccccaagtcaggaatctcaatgtctctaagaaggtgtctgaaatatatgaacatggtacactagtaatattctaaaaattcacactttttattctcatcttataactaggaaataaaaagttatcaatagaatcagcaggaatattcaactgagtctagtatttaatgctatatactatttaaagagtattaagataacatatctgtccttcagtattattggctcacatgttcagaacgatcttaagactttaccgaagtggacgttctcgtgatatagcttagctggtaaacagaggtatatgacagctaaacaacgacttctctttgtaaaatatgagatttaaaagtccaaattgcaaatagaaaatattttatatgaaataacagaaggatagtcattaatgcattggttaagaaattaattcaactatttatcatagagggttgttccaggtattaggatggatgaaggaaattgacagtaatattaacagcagtaacaataataatttcagttctattgacatttacggaacatcagtacatgagtgaacatctttgtaagtgcctcttttaggcagtagggacacagaagagatcaagatgaagtccctaggctcatggcgattacattttagacagaatgcaaacaaataactatgtaatatacctggaagtaataaggacttgggggagaagaacaaattgagtgtagagaaatatggaatgccagctgatagggtgggggataatacaaggagcagagttggtatttcaccttagtgttactcattttgtgcaatgtggtttttttctccatacaatgccacctgtaagaattacagtccaatagggaaatcaagagagacaacacatacttaggctaactagaaaataaatgcaatgtaacatattagtaagtactaaaagaggtgatatgacttggtataaatatgagccttgagaaaggcaaattggagagcacagcagcatagatgaaataatatgcttaaaatcttatttgattacaagaaaaataaatatataatgtcaaagagttgtgtcacctgaataagtgaaagccatgcacttttatttaatatttaatcacctaagaaaatgtatttcattttataaggttggtaaaaatgctctaccaagacctaaaacagttcaatgaaactatagactaatttcatttatgagtacagattcaaaatttctaaataaaagattaccaaattgaattaagcagtatattaaaagaatgatatacaaggacaaattgatttcattttaaaaatgtaaggatggttcaacatcaaaaaatctatcaacatatgtcttacatcaaccaattaaagtagaaagcccatatggtttttttttatcaatagatgcagaaaaaaaggcatacaattaagaagttatttctaacaaaaagtcaaagtaaaatcagattaggaagaaggtacttaaatgggataaagtcaatgtataaactgctgtactgaagccttgaattgaggattgataagaaataacatgtataaataactaagttgcatgactatgatgcaccaaaaaaaagaaaaaaaaaacttcttttatgataacatcatgagcctgtaaaccttgatgcccctgtccactttttcacaggtgaagcagaataaaatagagtaatcctgcagctgtcagctcctcttatacagtagggtcctcactcagctcagacaggtgaagccaccagccttggcaggtgcgccacaaggaacagtgtcacccagaccacaaacatgtgtagcttccttccctctgctatgtacacttagggtcactcatttatgggtttgataataaagcaaagtaaaagaagttgagtcttaatcatcatcctcattgacttttaaagatgggccaatgtttgatgtctacttaaaataaaccacagacaaaaagtataaaacagaggaaataaaataataatgaaaatatattcactgagttcatgttatgttctagaaattgctttcatttaattcttactacaactgtgtcagatagatgctattgtcattcccattttacagacaggaaaactgagaatgagggattaagtaatctgcataagattacataaggagtaagagttggaattcacacccaggcaatagggttctggagcctatgttcttctctacttctttacactgcaacaaatggaaaaaaagtgcaatcttcctggatggaaggacttaactccataacaagacaatccttccaaagtcaacatataaactgaacatcattcaaatcagaatgccgatgttttttgtttgttttatttcaaactggataaaataattttttattttttattttactttaagttctgggatacatgtacagaacgtgcaggtttcttacataggtatacatgtgccatggtgatttgttgcacctatcaaaccctcatctaggttttaagccctgcatgcattagttatttgtcctaatgctctccctcccgttaccctccaccccttgacaggccccagtgtgtgatgttcccctccctgtgtccatgtgttctcattgttcaactcccacttacgagtgggaacatgtggtgtttggaacatgaggtgtttggttttctgttcctgtgttagtttactgagaatgatggcttcaaggatgaagctggataaaatgattttgaagtataaatagaagactaaatgattgaaaatattatagaaaattgtggaagaataatgaggtggtactttctgtagtatgtaaacttactttaaagccattgagttataataatatggtattggcatgaaaaagacaaatggtcattggaaccaactagagagtttaggtatagataacgagtatttgttgaaatgacttattgtaggtagaatctgcattttatttcattggtaaagaatggtttgctttaaaaaatgataccagcccgaccaactatcaatgtgtacggaaaaaacagatccctttatcatatcatattataaataaattcccataaattaaaaatgttaatgttaaaaaagtaaaaatcttagaaaaaaaggagaatttcatgtaatctaaatgtaggggagcactttctaaagaaaaaaagaaactcagtagcttaaaaaaaaaagatagctatatgtagctagaaacaatctgattgattttctaaggcataaacttcccccccacccaccaaaaaaagttaacatccaaaagatagatctggaaagtacatctgtaacacatactacagacaaatcaatttcaccttaatatgcataggccttctaataatttataatacaagatactttaatagaaaataatttaggtaagaggatatattaggttggtgcaaaagtaattacggtttttaccattaaaaataatgacaaaaaccacaattaatttttcattcatacctcacataaagtcaagggagtgaaaattaattaaagaaacaagtaatattagcaaaaacgaatatcagtaatttcaagagtttgtggaggcacagatcacggataatttcattgtttatgataaagtgaatttccccaactttttaagaaagtagtatatcaataatgattaaaattaaacatgcattttccttttggcatggcaatacttggtaatctttccaatatgaaataaacacaagagcacatattgcatacattttcaaattttatttttagcataaaataatgtcagtaggattaacaaataatttgttttcaaccatgaaaggaatattatgcaaccataaaaaataatagggtgtgtccataatcaattaagtctgaaaagcaagttccagcataagtggtagagaactttttttctgtgaaaagtttttaaaaaataaaagagaaagagagagagacctaggatatgcaggagtatatttgctttgcttgtacgagcatacaaaaagtatggaagaataaacttcagactattaagttttcacctgagtgaaataaaacagagccacaattaatgtttcttgtatttatatatttgtactctttctctgtctgattgaaaaaatacaaatagaatatttgaaattaaaaattaagattaatatttttaaaggaaaggaagacattgtgaaagacaactttatttcaacaaatatttattgcacatcttgttctgtatgaatttttcaggggagtccatcataagaggaattactacactgtacggagtcaaatattcccacatgatctttctttatggtacatttttatcttctattgacaaaatactcttagaattatgcaatcttatgtctacacacgatggcaaggattgtctcatcacattagacatgagggttccgaggcctggagatgttaaatgttttgcctaaagccacaccgctttgagacatttatcatctcttagtccattcttaacccatatatcaatctttataaatgctcttattcatgaagttcttcaaaatagtttgatggagttaaagaagtgaggaagttgcttactatgcttttgggtgttactcttttcaagcctgaagccaatcaactaacctgcatgtctaagtttctgcttaaaatggggaactttgaaggtgccatgattctttttagagagacttttcagggatgtaaaagagctgctgaaagtcaatcgttccttaaacacttaaccggcaatttagccgtcctattttctgaagacttacaataaacagaaaaaatggaaacctgaatcattaagaaccactcaaataaaagaagtcattgtgataggaaagccatctctgaaataaacattttatttccagtgcaaaactataattctatttaaaagttttaatgtaatattattgttttaaagaacacatttcttgcttattcaggccaataacatgttcttttgtctgaatttttagggatgcaacaatatttcataatctttcttatgtacaatggatatacaaaaggtcataggaaattaaacaaactgaaagttttaatctcatatattttgaccacatatacaataataaatgtggtcttaagcatagaaaagaatagaatacaatatttagttaactggctccttaaaattcttggacatgggcagggcgtggtggctcatgcccgtaatcccagtattttgggaggcaaaggcaggtggatcacctgaggtcaggagttcgagaccagcctggccaacatggcagaacccctctctactaaaactacaaaaattagccgggtgtggtagcacacgcgtatactcctagccactcagggggctgaagcaggagaatcgctcgaacccagaaggcagaggttgcagtgggctgaaatcgcaccgctgcactccaggctgggtgacagagtgagacgctgtcttaaaaaaaaagaaaaaacttgaacacattgattaattgattgattgattgattgagatggagtttcactcttgttgcccaggctggagttcaatggtgcaatctctgctcagtgcagcctccgcctccctggttcaagcaactctcctgcctcagcctcccaggtagctgggattacaggcacctgctaccacacccaggtgatttttggtatttttataccttatacaaacattaattcaagatggattaaagacttaaatgttagacctataaccataaaaaccctagaagaaaacctaggcaataccattcaggacataggcatgggcaaggactaagtattaatggtttaaagtgttgccaagctctgacctgaactctcaaagtattctggtctaagaggcaagaaagccgtattcttcagattagtcaggttgaatttagctgtgatagctcttctttttttcatttctgttacaaataccaggaagctctctgagtttgaccttgactcattttccgggtccacagacagcattgcacctccaaaacaaatagcgtcctatatctgtgctacaacctttgctagttttagggtgtttttaaaaatattccccacatccaggcaaatcctctatgtttataaggaacacatctaaaacttctcttcatcccagcctctcttcttagaactctccaaaaagtttttttaagattcacaatgatttcatcccctgtagtataatttggtagatattggcccattgttaattataaattaccaaagtaatcatcaagcaattgtccaactagcatgtggtgagagcccttttgtcaccaattattagtaagaatactctttaaaaaatctcaggtcatagtcttcctggatgaaaccttctccctttgatttaagatagaaaattatggtcagtccttctccattttaatttctatattgctcctctttggtttgcataggggtacaaatgtacatataaatatgtcaccttgtagaaacctgtctcttaaagtttcaaaataactgtatgctagggaaaaaaatataatctaacaaaacatgactctaattactaactgaactccacctctgtgcacatggtactaagtgaatgtagagtttatccctgctatgaagaagcttacaggctgggacatgagatatatatcctggcatttatataaagagcactagaaggtaccaataaaagagatgaaagaggataacatgtaaataaatgatttttgtcatggcctgtgcacattttttaggatctctttccccataagaacatgagtgtgttaccactatgctcctgtagagtttagccagaaaagaaaataaacttcagacattctagaattctactacaaaatgttgttctttcttctgatgctcaagtccacatgttagctaagcacaaacatctttggcttccctttttcaaagctttctatacattccttatccctgagaagaggatgtgctattaatgctttaattgctaagttatatataaataagattcaggaactcaattttgcatcttcggaaaatatgaataatgatttctctttcccttcctccaagaaaaagtgacttatttggcagtcacactaacagtgcaaagaaatgagttctgatgtttcatttagttgagttataaacatgaaaaccatcaaatcctatgcaaccctattgaagcatgtggatgtgtgaattttctccatgtgtttgctctgtgtccttcagaacacccacagtggcgatgaatcgctaaggtgtgtatcagtctgacagtcgtagaaagtggcaagactgaaagccaaacccaggaaacagcatttcatttagctcctggagtactgctaattgatctcaaacccttcattactgtctagtccaaaggcctcaggagaatgtagccatttagaaaatgacttaactgaaaacaagagcaaaattctaggcctcgtgaacttcaattgctctattcctgtatcgtcacactgattctaagtttatctttcatttcaggtcacttggaaacccccactcatccagaacggagacatacttagctatgagattcacatgcctgaccctcacatcactttaaccaatgtgacttccgcagtgttaagtcaaaaagttactcatctgattcctttcactaattattctgtcaccattgttgcttgctcagggggtaatgggtaccttggagggtgcacagagagtttacctacctatgttaccactcaccccaccgtacctcagaatgttggcccattgtctgtgattccactaagtgaatcatatgttgtgatttcttggcaaccaccatccaagccaaatggacctaatttgaggtaagagaaggtgactatgatttttatgttgctgtagtccttatctctctgagaagtagggaaatgaaggaggcttttattcctatatgaacatagaactaatttggcattgaatatcccctgactcataactttcatacactatcatactgtacacttcaacttattatggaaacatcaaagtttatcaatttgaagaactaaaaacccttgaaaccacaatcactattgtctaaggattcgctacataatccatcacttcattttcaacatatgcttttattatatgttaggcaaacctgatgtaggttctatatgatacatttgcacaaatgtacctcagaattctaaggctaacacagtaattctttggcatgttgttagcttatggaaacttgtgaggagtgtggtcagggagcccgatacgatgaaagaaaagagctgtgattcagaaatggttttgcaaccacccaaacttgatacttggccaagaatacaaagttgataatattatcatcgtttataaagtattgatagtcataggaaaccattaacttgataagctttgtgtatttctactttgtgcgaaactggcagtaaagatttggcacatctaacttagaagaaatctaaaatgctatcattctgggagataatagtaaaatgcgaatgtaactgattcttcaaaatattaaatatatggaatttggtccagaaaaaaaaacgttcatctgaaacaaaaccacgtaactgtaaacttaagatgttattctttatgcttccacgcatatatcacacgcacatgccacagaacagcctgagttttggtaatctcaatatgagttgagataatcctgatgttcctgcttgtcttttgctttagatatgagcttctgagacgtaaaatccagcagccacttgcatcaaatcccccagaagatttaaatcggtggcacaatatttattcaggaactcagtggctttatgaagataagggtcttagcaggtgagattacaaaaactataaaaacaaatgctggcatttagttctgggcatgttgaatagttcaaagtatctcagtgtcttcattgtgtgagcgtgttatcagttatgcaataaaacatgtttggttattatctgtggcattaatcacccagctgtaacagtcagcatgtttaatgttttccatcttaactgcatgcttaaaataagccttttgaagttgaacttgtagatgttcaagccttaacctattgcctttgtcacggctccatctagacataaaacgttatggaagaatttggaaatattgaacacatacaaaatggggaaaattcctgggcacttgtagaatgcttgctatttctagaaatggcttataaatgaattataatgacttataattgattgtaagttattgattcagtccgcaaaagaaaacattagtgaacaggattgggacttgaaagaattcaatctagagttcaaagacattcagtaaaggctaataggtgacagtagaaaagggtgctacatgggagagttaggagatctggttctgctttagcctgtgctggagaactagctttgtgactttaggccacaaagcttcactacttaaaaatcacttaacttctctgggcttcatttttgttgtccataaaatgaggtgattttatagaattaaatgacttctaaatcttcatgagttcaagcaatgtgattaaatttcagaaaacatgaacgttattttatgaaaactcctcgatcatatgtttcagtaacttttctatgtgggtcattatttttctagacccaccactgggtagctgtagtctgaaccctgtttaccattctagccttgtctcccatccctttcttaccaaggcctctgcattccagccacatttgtattgcattcagtacctccaacatacaacacttgctctttcagcttttccccatagttgccttttcctgttgcctgactagatcatctgccacgtcttagcctggaggtttcttcctctaggaggcctttcctgccaacactcttgctggtctgattcagctcctctgtaacatttccataggacatcccctaacatatcactattgtcattgtagtgtactggcctgactgcttgtctaaacaccacgttatattatcagatctaccataaggcaggggtgcggtcttcgtgactctgtcttcagttcctagcatggtgtctggcacataccagcacatagtgccctacacctgaatacttaaaaataggttagctcaatcaagaattaattcactgctctgtaccttaggaatattagctgtagtgttcttctctctggggaatggcaaaactaaggaaaattctcctgtcctcttaaaaagttgtggtgggaaaacatcctagttcttgtaagattctcagagagaggcatctcgtaaatctgatcaagcaacagaatgaactatatgaaactgccacttttataggtgaagattggtcaattactagcagatccatgttgcttatcctaaattataatgctcattatactattctcaactacttttaattcattatttacttaatttggcatccctatatgattatcacttcagtagaataaattcatttatttttgcttatttgtgcttactgtgtgctgaggcactgtgataaggaacaaaagataaatacatcttagcccttgacctcaaagaacttataatctagtggaggaacccttccccccgccccctccatagagagtgtgatataatatgtatttttatatattatatacattattaattatatataataatcaatatatattatatatttatatattgattattatatataattaataatatatataattaatatatatattaattgctgtcctcagagttatctacaaagtcaccaattctgcctaaagaaatcacttcaaatagtagcttcctgtgacctatgaactcttaagtgcttaaatataactatttcaaaaaataaatagaacttgactctttaacattactgaatctgagttttagccatgagctactcagcaaaaacaaagaataagtttccaaaagttaattttgtttctttatacaagaaatgaaaacttattaaataattaggaccaaggccatgaagttagttatgaatttttagtgattcctctaaggattcttaatgagaagttcaaatctaagatttcaggaaaaaataaagtgaatttccacaacttaaattgaaacatgaattgacataaacacacccatgacagctgcttccggaagggaagtgtgcagataacaaaattgtgttaaagggatattttgactagtttcataatgccaaatgtcatttttttccggtagtacttgcacagattttttttatttattaaaataacagctacaacttacattaagcttgtagaaaaaaaaaaagcatttcttcttaacattcagtgtaaatggcgtgagtctttataagaatctctttttctagccctctaccctttataagtccataaaaagctaggagtgcctttagcccaagggggagtgtcttgcaaatatgagagaaaaccaaaacttgatcccctggcgggcaggatatttttctctttaaaggaagtgattttgtttggttagatggtgccactggccaccttggcaacatccggggctccttgttcctgctggtcagctagtggtctgtcaaattgcagagggggatgaagctgagtgttcatcatgtgttggttcacccctgtgttactgttccttcatggcccttcctttgcctatatttgttttgctgatttatttgtttggccaggtatgttttcctgggtttttaattgaattctaatatctttgggaggattatgtaatttcctattctccccagattccaccatcccaatttccttcttaacttaacgtctgcataaataaaaggagcactgaagtgtttcttaccatcttgacttgaatatcaccatagttacatttagaatcagcttttaaatggcacttctcctgatataaaaagtaaaattaagattcactagacatctctttatgaatatatttgtgacagtaaatataagttgaagccaatttcctagttcaagtggtctattttggctaagtatgtgtttataacgcatagaaaagcaccaatttaatttaaaacatcattatatttggaacttcagatcattctagtagttattttttcttttatatctacatgtacaaaacagtctcaagtcaattatccagataatttaattctaacaaaaatactttttgctcttatgattatcttaggtaaggagtaatttttgtctaaattgcacagctagttgcctcattatcgaattttgctctgcctgtgtagacacgaattccgtataactacaggtttatactgcttgtcagtttctaacttttcttccttaataattccttgcaaagtgagcaagttatggttgttgggggaactataactttgggtttcctgacattttcatcacttagaaaatctggcgaacgtgctgttatcatctgaagctgccgaagtgagtcaggcagggtttaacaagagggcggcgacctccttcattttaagcatcaatctaccttcacaattttcagcacctaacaacactgccttggttcctaagtgatcagataaaactgctaagaatacaatgagcatgttctccttttcgttgtggatttaaagaagaacaagttataataaacaatagggttattttactattatagagaaaatattgactgtcagattataatttagatttataaattagctttcattaagtttatgaaggaatgtatgttctaattgctattccttttaattatttatacatttctcagagtatttttttttttttttgcaatgacaatttggatggagacctctatgtgattcctcgagaatccactaattgtattacatttaaattaaaacattcaaaattaacacattttcgtcttatttttcaaagaagggtaagacttaagatgtaaatgcttaagctaaatatatcataaattctaagtttaaatcttattgacatatattttcatatatatttttaaatctactaaaataaagatgtttcaagtcctaaaagaggatgccatttctgtgggggataatattcaaaagaacataacttttgttcctcttctttgtaatgagattaaatatgtatagatgacatctgcatctttgctagtatgaaagactgggtcagttccatgacacgtgtttctataatataaataatgtcagattgtagctattaagtgaagaagttaactttgtacatagaaagggcaagtgaaaggaaagcttctcccgtgactaccaagatgagatagatcctgttaatttattccttaatatgggaatgtgaataaaaattgagtctaagaatgaaagccaacttctgtcaacactagtatgccatctcatagccatgcacttaattcaaaaggagtaaacatgtctttcacattcaaattaaattggtcacagtgttttttcccattggatttttttttcaatgccttacatgccctacacgatgtccttttctgtgtcatcatattatgtgttacctccttgtattagcccattttgcaatgctctaaagaaacacctgagactggataatttataaagaaaagtttacttggctcatggttctgcaggctgtacaagaagcctggtgccagcgtcttcctctggtgaaggcttcagggagcttttacccgtggtggaaggtgaaaagggagcaggtatgtcacatggcaagagagggagcaagagggcgctgggaggaatgccatgctcttaaacaaccagctctcccctgagctaatattgtgagggctcactcactaccacagggatgacagcaagccattcataagggattcacccctatgatccaagcacatcccattagggcctacattcaacattggtgatcacatttcaacataagatttggaggggacaaatatccaaactatatcactcatgaaaaatgaacttctaaatccagaaggatgtgttttgtcacaggaggtttttttcccctagtgttttcttagaataaaaaagcagaaaaactactttcattggctgtatttctttctcatggtgatgacaaagtagaacaaagatggaaattactgcaaaattatcttaggtctgacaattctggtagtgtagatatagatagcaacagaaacataacagcttcaagtttcactcacaatctaaaatgtctcatattaaaaatattcaagtgtgatcaacattactcttcaatttttgaagcaaaaatcttcaatactatttttagaatcaacaaatagattttttaaagtgtctaccatcagctgaaaattttaatagctatagacttaagcaatggaaacaatattgcatttcatttttctttgtttgctattcccacaaaagatttgaagatgtaaggaaaagtatgatttatgagatttctcaaatccacacttgtgtgatggtgtactgaaaaatactttgggttgtggcagagatgaggaagagttagtggaagaagcaactaaataacctgcattttcagaagcgtgatttatattggtgacaatattaacacatgaattctgttaggacatcaataaagttgacacatttttaattctgatgaaaataaccccaggcattctgcagctgccctgaagaattttggtttcccacaatatatcagtcccttccaagatacaagccttcacatattttgccctggacaaatgtcttcactggataaaataccacttcttatcaaaacctgccccaaatgttacctcctccgtgaagacttcccagctggatatggttaaattagatgcttcatctgatgcgtgttcaaagaataaggaataaatgaataaattagatgttctcatttaaaaacatatttctgtaaaattttatatacattatggctccaggtggacagataacaattttattatttttaacacctggcatattggtaatatccaataaatattaaatgaatgaacaaatgaatgagtgaagtgatgtattaaatatgaaaaagcaatataatttgttttcaatatatttttaaaagcactttgctaagtttcagcagagatattctttctattggacaggtagatttttatctcactaacctaaaaaattatataagtgacctgaaatttttgagactgagtgcttaaataactatgaaacatctattcattcatttataaaattatctattcagtaaataaacaaattaaaactgcatcatttaaacataatctagttttctaattcattggagtaataacacctgaaccttgaaatgaatattgttccacaagtaagattttaacacatattattttttatgaggaaaattaccatagtcatgtctataccataataaagtttacaatttgctgtttggggagtggaggagggagagaccggaggatggtctcaagcaaatgggggaaaaactattgtaatagtccaagtattcctaaatggacccaaaaacaattggttttactggctacatcatagactcaatataagtattcacttactttgaatacttatattgcaaaagttttttcctacagagtttaaaatggacatttttcaagacatgcctagagaacacactttgtatttagagaagaaattgattgatacacataagttttgtcataagtatatgatgttaattgatctagcatttttgttttaaaatgtattcttttatcatttattaaatggaatgtcccatttaatatcaacaatcaacacgtaagtccatttgaaaaacagtatacatagagtgaatggaaaaccacttcaagccaactaatacattctttttttgatatgaagtggtgaaatgtgaatcaacatatatatgtagacaagccataggtatatattcttactaaatacagattggaattcagatgaaatgaaaacagtatattttagtatttaagaggattcaggatcttgtttcctcggccaggcgcggtgactcacgcctgtacagaatcccagcagtgggaggccgaggtgggtggatcatgaggtcagaagatcgagaccatcctggctaacacgatgaaaccccgtctctactaaaaaaaaaaaaaaaaaagctaggagtggtggctgacacctgtagtcccagttactctcaaggctgaggcaggagaatggcgtgaacccgggaggcggagtttgcagtgagctgagatcgcgccactgcactccagcctgggcacagagcgagactccgtctcaaaaaaataaataaataaaaaaaaaataaaaaataaaaaaaaaatcttgtttccttaaaaatttaacttaacaatgaaagttaaagtacaaaagacaaatgtacggcctcaaatgaaatatctactgatttctcaattaaatttttaaaaagtggaaatagtgtaatattggaaatgaataaaccctatgtccagctaccccattaactagttgtgcaaacttacacaaatccacttgtttctcagggtctcagggttttttgtttaatctgtatgatgtagcacacactttattatttgtagcagataaactctaaagccatctcttactctaaaattttagaaccaccttgaaaacaggcatgcaattgtgtgtatctatgtggcctgagttttgtagacgtaaattgtgtatttcgccataactaaattattgtgaaatctcttaaagtattataaaaactaaagccctatagaatttatttacaatcaaccattttagcgccacctgatattgttaattccacatgtaggaaagaaccacaaacatggtatcactttaaatccataaagattattaattgtataatagcatagacatgtggaagaaaaatttacatattataggagaggaggctaggtatccagactctagctacatttcttttaagtcattttatgaagtaaaatataattataagtattttacccagggagagagctaatgaagccaaggtcgctggttcaattcccttgtgagccattagcttcatttcattccattgtcataggcttgctaccctcttaaccccgactcatcatccttcatattcatactattggttgcaaaggaaatttggccagactgtttgaatgtgtaagcaaaaatctattccctctgctagaaaaataacgcaaagttcaagccttagtgatatgacatcatccaagtatggacagaacagattatcattatgattgttattattactattattattatcatcactattatgttggcagtatagcatcatggttaaaagagcaggctctgaaatcagactgcctatatttgaatctcagtcctcctacttattatctcaatgacttggacaagttatttatctctctgagccttgtttttcttattttcaaaataggtattataatagcaccttatagagttttgtgaggaatgaatgggttaacatctgtagaaaatgcctgacagctattaagtaactattattattttttagttgtctggattatgtggactattcagcacttgctaaaaagcatatgtattcattttccagggctgcagtaacaaaatatcacatactgggtggcttgaaacaacagaaatttattctctcacaggtctggatataagaagttgcaaaccagtttgtattctggaccagactcccttccaaagctctgtagaagaaccctttcttgcctcttccaacttctggtagccctaggaaatccttggcttgtgacagcataactccaatttctgtttctgtttttacatggccatcacctccctgtgtgtatccatgtgtctataaaatttctctctcttttttcttccaaagacatcagcattgaatttatggtgctgcctaatccagtatgacctcatcttaacttgattacatctgcaaaaaccctatcttccaataaggtcgtgttcacagggaccaggggcttgggcttgaaaatatctttttgaaagatacagttcaacccactacagcagacaaagcagaaataaaagaggcattaaacacctgagaagagatggtaaagcagggaggtgtagaagatctgatgcaagcacatatttaggagaaatagataaatagcctcaaaaagtcactaagttttacctgtaattacaatagagcaacacctttcaatgtgggtcaggcagaaacctgcaaacgtatcttcgggctatgaataagaaacaggatgagtcaagcagatttcttctacctaggtggcagtaaaatgctctgaggatcctgatataattttggtcaaattatttaacacaatcctgcaaatggcacctacccacccatgccacaccacctttgcatcgtcaaatcagagattgtgacatattgagacaaatactgtgggccttacactggagatgaggtatccttgatcatctaataaacccaaattaggtaatgatctgaggccagtgtttgccctgtgtcctggatgcctctgggatggtcgtgtgttgcactacatgtttaagcaagtatctcagtctaagctattgtccactcatagactgactgtgtctgtttatggcatttccttacacaggtagttctgaaccaagcaaaggaagcctgatggtcttctgcccaaaactggttaaaaaaaaatggtggctttactctatagtcaatttaataaatgacttggaaagtcctcctcatatcacatcagcatgtcagtttttgccttctgcaaagtaatattcggtttccactgtattgactcaagtaaatatgttcacactatggcaaaatacagctcactgtagcaaaactctcagcgggagaatgttgtacactttggtcacagttacaatttaatttaggggtttatctgtctgcagtgagattatgggaaagaagcataggtatcggaagaaaatgttgatgagggattctgatatttgaaaatggatgagtttccaaaaagaagagcataaaactctctggatcaaattcagatagaaagctggcaggttgcctgatttgtaattgcatcttgaattgagctgtaatcctcaccacttctgaaaacaataagaataagaaaatgataaaccacatttgttttcaatagcaatatttgttcagcattcctaataaaatatttccctgatgttttggtttatgctggcaagtcacaaaattaatgatatgtgttgtgtaaggagggaaaataaaataatgtattttctagggaggaaaagaaaacagtattttgtagaggggtggaaggaaatcctgtattttgtgaagaaaaaaagaaattatttgttagattttctgtaaagtagaaattcatatactttttttaacaaaacaacattttaggtttacaacctatgaatatatgctcttcgtacacaacagtgtgggttttacaccgagccgagaagtgactgtgacaacgttagctggtcttccagagagaggagccaatctcactgcgagtgtccttaaccacacagccatcgacgtgaggtgggctaaaccaagtaagtaagcttctcatacctgtgttaacactttgtgtatttttaaaagcatattctttctttactatgaacctcccccatgtacacatcattttgatagtgaagtgttactggtaaatttttaccaattgcagattgacagggctgtcattgaaaactttagaagggccatttttattagtacccaaataaattagaaatggacacattaaaactaaaaccctggggcccctgtgccattcttaagatgcaaactctctcctactttgacattgttcttgggcctcctgctctccctctgtcatttcctttgcatgaacaacgtaatttctatcataccaggcaattgtgatagacatgtccatgtattaattggatacaatgtactattgttcaccttccttcagagagctctgccctaatatcttgtaactcgtcgctcattagcaagaaccatttaattggattgcaataatggaacagattcttcccagtggatcatcttcagactggctatgggcagaattccagcttgatccagtaaaaggaagcctagacatcaccactggatccacttaaataatgcagggtcgaccctggacctgctgggaacacttttttaacaggcatttggaagagttcacagagtaatctaatctgttcctgcaacgttagaaaccacagtaactgaaatttcacagttacttggtcagtagggtagtattaacatgttaatttgttgtgatctgttaatttgtgtcaatccctgacgactatcaggaaaaaaaccctgaatctaccatgagaatatgtattaaaatcagtcttataggtataacttgagatctggcaaatagtttcatcaaaacttgtcagaataacaccaaatattgagaaatacctgatcaggaaagacccactcaaaacattttatttatgaaagaacactctgctcactggggtaatcatctattgatgatataaaaagatgaaaagtcactactggttgggcaatgtaaccatgtgattttggttacactggatcagccttgaatttggttacagcttaagaagagagatgctccatttaggacacctgagtgatatcaattgtgaattaaagccagaattgaggatatcaattgtgaattaaagccagaattgaggatatcaattataaattaaatcagtaggttaggtttatctgtgtttccacaaaataatccatctttacaaaagaaaactgtctttctctggtttttataaggctgcaggtttctaatgatctgtgacacttgtattgggatctcttaaaccattttaatggaataatataagttaattgatgcttatggctaccctctgaaacacctctgggaaaaatacaaagtttttatctggggatgtgttttaaggcatatttccattcatctccctcttgctctctactccacctcactaactgattcatcttaaaagcctactcataaaggtaggctctcccccctcatctgacatttgaatacttctgttaagatccggctggtgaatttccaccaatataggtcctttatgttataattgcattcctgaagtaactgtgcttataaaaactgacaaacctaatagatctgaagcagctcactgaagtttcattaccttggtaatctgaacctctgaccttcgggatgtaggtaatgcaatctgctgttatttccattcataccttggaaatttttcagataactatttgtgagcacaaaggttaactctcagaagagggtcagtcttgcgaaagcttgttgcattatcattttcttcttttgggcaacttgctatcttaagtaaattaactagtcgatcctctgtgaaaggtggcctattttttgcaattttaattttaaattgttgtcttgattggataggaaaaacatggcatacagtctaatatgctcaaaggcaacaaactatagattgaaaatactttgcagtggaaaatcatgttttaaatttataaatatttgcttattaaaaatcaccttccaatgtatatatatatattttaaagcatggtctttgtctattatgaccctccccatgtacacatcattttggtagcaaaatgtttctggtaaatttttatcaatcacagattgatatgtataagttattaaaaacttttgaagggccagttttaaacattagtatcacatacatgatatgtgagataaaagcgtccctgtgttacttcagttcatttttggaaggcagatgttgcaaattggcaacacagtggccatatttccttcctcctccagcttccatacactgttttgcccacagtatttgaaaaaataatatttgcaaacatttaagaattatacataaagataatttgaggattcacttgacaagtcaaatgatggggtgaaacaatacccacatttctggaaggaaactatcagctggaactggcttcccctttagacagatcatgccctaaaaatctgacccggtccccattttcctggtcccaatagacaggtgatgtttatccctgctttatatgataatacaaaatattttgccctaaacaaaatacaccaaagataaattatattgtaattttgaaaaatcacagtttttgtatttgaaaaatacctcacttaaattatttatacaatcctcagaaaagcacaatgagatagaaaccagcccatagtaacttaccaaaaattatagaaagtaccagttcccaaactcaaacttaggactcaggcatcaaattttctatttctcatgcgtttagacttaacagtcattaacactttaacaagaaggatttaaaaggatccttctcatcttgactgctcagtctaaaatagaaggcaaaataagaaaatgcctaccaaagggagtacagtggagagatagtgcctcctttgaagctgattcactaaggaagtcagttgtggccagaaaagagcagtaaaacactggagggagtgagagggcaatgctttgtaaaagaggaaatgaaaaatcatcaaaatattgtctactttactgtctgtcaagagctcaccccaaccttcagatgttcatatcttgtatcatataatcctcctggtcttgctctctccttcctctttttttccatcttccttctttctctatttccttttttaaaatgtttttgtagagacaggttctccctatgcttaggttagtctcgaattaatgggctcaagtgatcctctctccttggcctcctaaagtgctggaattacagccataagggaccatgcctggccatttgtctatttctcttcttctaccctctctctctctctctctttcttcctattttccttccttcctcacagatacatttatcactttctctgtcctgagcactcagtgaactctggaaaatgcataaagtatgagggtatcatcattaagagggcaagtttaaaaccacagaaaaagcatttgtctcatcctgatctcttaatcagaaactaccaggtttgatagctagaagtatatctgactttgcctgaatttatctgattaaggtggcaatatctgtaaataattccaaatctcatctcttctaaaaagcacctaccattgttgcctcaccttgttcctctgttctcttttccatcactttagttatcaaatagaagagaccacatctgacttttccattgtcttccttctcagtcacttgtgcacctgttgtaatctgtctctcttcacttgtactctacatggttttcttaaagtcattagttatcacctaatgacccatttcaaaactctcttctcaatgccatcctactgtgttcctcttgtatccagcactgtgaatgatcccttactgactataattcttccccaataatcattactcccctcttctcaccaactacttcttctcatccctaaagatgtttctcaaagttctttcctgagtcttcctatcatactcctgttctcttgttggtgattccatctatactcaaggtttcaaattcttctaattacaaaaatgacaaccgccaacattgtatgcagccatatgaataaatagttttaaaatagactttgggatcagggatacttaaatttgaatcccagttccaatatgttttggcactacgacctagaatttaacctgagttccagttttctaatcagaaatatgaagataataactgccctgaaatctgttaaggactaaatgaaataatatatgtttaacaattagtaatcacctagtatttgtaatacagagtattattctatttctaaaatgtgcatggtcctttcaataccattttatataatatataaaaggggaagccatgtctagtaaaagcttggaagttgattttgcaagactattcagataaaagcattttttttattattattatactttaagttctagggtacatctgcacaacgtgcaggtttgttacatatgtaaacatgtgccatgttggtgtgctgcacccattaactcgtcatttacattaggtatatctcctaatgctatccctccccactccccccaccccacgacaggccccggtgtgtgatgttccccttcctgtgtcctagtgttctcattgttcaattcccaactatgagtgagaacatgcggtgtttggttttttgtccttgctatagtttgctgagaatgatggtttccagcttcatccatgtccctacaaaggagataaaagcatttctacagtgagttgaagatgcataaagaatatatgttattttataattacctgacttggctaaaagatagaaatttaaaaatctagttaaaatgttgaaaacttagtctgggttccatggctcatgcctgtaatcccagcactttgggaggccgaggtgggcggataatgaggtcaggagatcgagaccatcctggccaacatggtgaaactccgtctctactaaaaatacaaaaattggccaggtgtggtggtgcatgcctgtagtcccagctagtcgggagactgaggcaggagactcgcttgtacccgggaggcggaggttgcagtgagccgagatcgtgccactgcactccagcctggtgacagagtgagactctgtctcaaaaaaaaaaaaaaaaaaaagcgaaaactactaactattgcatggcatccattctcctctttttcttttagtgatagccttgccccttatctagaaactgcatttactaacctcccttgcaattagtcatggccaggtgaaataccagtagtatgtgtttgtgtcaatagaaagtgaaagacaatctgcatctttttgggtattaaccagaaaacactgggtgtgtgcctacttgttctcttttagcccttcccctggactggaatgaggacatgatcatgttctcaggttcaactatgcagtcgtgtacaacacccaaagagatccaaaatccccataagagaaagttcctgggttcttaagtgaccacatggagcacagtctgttttgatcactttgaagctattacatgagatacaaattaacatggattttatttaaactattatattttggagattttaggtttcaccagcttcgctaactaactcattccctgtttgcccatatcaatttaccttaaaagtagaaattagctatcctgttttttaactaaatataaaatgatgaataattaatatatctattatactatctcctttaaatacagttttctctggcaggcccctgatagaagctggaacactatgagagactaaagtagctctggagtttccaaagtgcaggtgtttggttttgacagatgggtaaactagagacaagacaggagatatgctgctcggaaaactaaggaggctgacttgaaggattattgcccaagaagttaatctttccacttcatgtcagcagtagtaccctcaggcagagtaaagaattttctcaagagcagttttgacaagctcaaattttccaagagctgcttagttggtgacgcagagccctgcaccatagaacttggaaaattggactctaatttggagattctgcgagcaagatcaagacttccatcataaaatcagcttaataaggtccttccaggtttttacatttgagcaacattacctcccaaaatgagcctgctaatgtgagatgtctgaagaatttagtcctagacaaataaattaagagatctaataaatgaaatgatttactataattgatctgaatcagtacaacaaactttttttgtaaagtgtcaaatatgtataatgttagactttgaagcccatacagtctctgtcttaactcaaatttgccactggagcacataaacagcaataaggtgattctgatttttaaataagcatggccatgttccaataaaactttattttggacattgagatttgattttcatatattaggttggcacaaaagtaattgtggttttcgccattgaagtaatggcaaaaaccacaactactttgcgccaacctaataattctcacatgtcatgaaatactttttttcttttgtttttttcccccaatcaaataaatgtacaaaccattcttagcttgcagggggtgggccacactaggccaacaggccagatttagctcatggaacatagcttgctgacctctaatgtagatgttaaaaatctagaagacataattgacattgataattgtcttggtctgtttgtgttgttataacagaatacctgaggctgggaagtcaataaggaaaagagttttgcttagctcatgattctgcagactgtacaagaagcatggctgtagtatttacttggtttctggtgagggcttttgtgatgcattaaacatgacagagaaggtcaaaaggtgagtggacatgtgcaaagatgcaaaatccaagggatgcccggctttctaaaaacccactcttgagggaactaattcatttcttcaaaaactaacccagccttgccagagcaagacaccaagccattcatgagaatctggccccatgcaacaaacacctccaactaggcctcatcttccaaaactagtacactggaggtcacatgaggtttggtggtgatataaacccttgatccccctttgctgggaaccatggcaataatttaaggccatgtaagaagcacaatctacttgctgttgcaggataacttttaactagcccgtctgttatggactaaagccctaattctcagtgtagctgtatttggagacggggcctctaaagaaatacagtcatcccttggtatatgcaggcgattggttccaggactgccccctaagtacaccaaagctgtgcatactcaagtccagcagtcagccgtgcagaatccatgtatatgaaaagttggccttctacacgagttttgcatgggagaatactactttattttttttggagatggagtctcattctgtcactcaggctggagtgcagtggtgtgatctcggctcactgcaacctccacctcctgtgttcaagcaattctcctgcctcagcctcccaagtagctgggactacaggcacatcccaccacgcctggctgattttttgtatttttagtagagacggggtttcactgtgttagccaggaaggtctcaatctcctgacttcgtgatcctcccgcctcggccttccaaagtgctgggattacaggctagagccaccatgccagctgagaatactatattttcaattcttgtttggttgaaaaaagtccctttataaatggacccaagcagttcacacctgtgttattgtgttgttcaagggtcaaccgtaattaaggttaaatgagattataagagtgggacctcgatttcataagttagcacacaggctcgcttgctctttctctctgtctctcccccaaccccttctctccctttctccgatcacagaggaaaagcatgggaaaactcagcagctagaaagtagctctccaaaagccagggaaagagccctcagcagaaactaaatttgctggcgccttgatcacgaacctctagcctccagattgtgagaaataagtttctgttgttcaagccacccagcctttaatattttgttaaggcagcccgagcaaactaatacatatctaactactgttaaaattatttaggaattcattataaaggagaggagcctgttctatatttgagaatttgctccagctaagataaaatttctgaccaaggattggaggttgcaactaaaaataacatttaatagcaaagctcttatccaaaaaggttacaacctttttcagctcactgagattgtaatagtctgttctcacattgctataaagaaatatgcaagactgagtaatttataaaggaaaaaggtttaattgacccacagttctgcatggctggaaaggcctcaggaaacttacgatcatggcagaaggtgaagagacgacatgcgagataggtgagagagagaatgcacacataggaggaactgtcaaacacttatgaaaccatcagatcttgcgagaactcactatcatgagaacagcgtgggggaaaccacccccgtaatccaatcacctcccaccaggtcctgcccttgacacatgggtattatggagattacaatttaagatgagatttgggtggggacatgggacctaaccatatcagagattaacttgatattcccacaagtagggcaatacctgctcagataaatttatgtggtccacaaaatatgcatcatacataataggattagaatatctgagaaaatatatcccaatatacacatatttaacataatctcacaggaaatcccgatttctttctattgcatcaaatacaagcaagtacaagccttaactccatattgtataactgtaactcaaacattcacattgtagtttttaagttcacctagttgccacagaaacacttgaaagataacaaaatcctaagctccaacaaccatctgagtggatccccacttggccaaggggacaccagagcaaccttgaaaactgagttcttggctacagtgggatgggaagtcagacacccctccctggctatacaccattagggttacttccctaagtgctaagcagaaaccaccctttcaaaagattccaccactgatatcaaccaaccacctgatgctgcccctcttctactaactgatgagagacctctggccacagagttgtcatggccagtgtatggagaatctgcagtcagggtcttcatgtcctcttcttcactgcttgatgtcagagggctgaaaactccaccctcagattgtgctaatgctgccatttttgtacgtgggatgcaccaggggatgtaaaactcaattgcacatgtgcgtgtttctcctttcataaatactcatgactcttcctgaggcttattgaatatgtatattcagtcaccccactcagcataaattcctgttgctcctcccttgaagaatcttttctggcttctggcttaaggctaccatatgcttcccaggctgtctgaatggccatcctgcaggctgcaaccctttatgagaagtaaagctctccttttcaaatttatgaacctcttctgttgacacacttcaaactcaagaagtctcaaatgaaacaagtttcaaaatctcatcccataattccatgttttctatcttatttaatgggattcacccagaaactaaaaccaaaaatctaagctatagctgtatctcttccttatccctttttaatttgtttatttacttatttgtacacgaataagttctttagtggtgatttttcagattttggtgcacccatcacccaagcagtatacactgtacccaatggttagtcttgtatccgttgcctcccttccacccactcccccgagtgcccaaagtccattgtatcattcttatgcctttgcatccttacagtttagctctcacttatgagtgagaacatatgatgtttggtttttcattcctgagttacttcacttagaataatggtctccagttccatcaaggtttctgcaaatgccattattttgttcctttgaatggctgatacacacacacacacacacacacacacacacacacacacacacacaccaaatttttttatccactcattgattgatgggcgtttgggctggttccatgttttcacaattgtgaactgtgctgctataaacatgcatgtgtaagtatcttttcatataatgacttcttttcctcttggtagatacccaggagtaggattgatgaatcaaatggtaaatctacttttagttctttaaggaatctccacactatttttcatagtggttgtactagtttacgttcccaccaagtgtaaaaatgtgttctttgtatcacatctatgccaaggtctattattttttggttttttgattatggccattcttgcaggagtaagatggtaccatattgtggttttcatttgcatttccctgatcattagtgatgttgagtatttttcatatgttttttggccatttgcacgtttcttggccattcttcttttgagaattgtctattaatgtctttagcccactttttgacttgattgtttgtatttttcttgctaatttgtttgagttgcttgtagattctggatattagtcctttgtcagaagtaaagatttttaagactgtctcccactctgtgggttgtctatttactctgctggttatttcttttgctgtgcagaagctttttagtttaattaagttccaactatttatctttctttttgttgcatttgcttttaggttctttgtcacaaagtctttgcctaaactaatgtctagaaggatttttccaatgttatcttctagaatttttgtggtttcaggttttagatttaagtctttgttccatcttgagttgatttttgtacaaggtgagagatgaggatctagtttcattcttctacatgtggcttgcaaattatgccagcaccatttgttgaataggttgtcctttacccactttatgtttttgtttcttttgtcaaagatcagttggctgtaaatatttggctttatttctgagttctctattttgtttcattggtctatatgcctatttttataccagtaccatactgtttttgtgactatggccttttagtatagtttgaggtcaggtgatgtgttacctccagatttgtccttttagcatagtcttgctttggctatgtgagttcttttttgattacatatgaattttaggatttttttcaagttctgtgaagaatgatggtggtattttgatgggaattgcattgatgggaattgtgttgatggtaatttgatgggaattgcattgaatttgcagattgcttttggcagtatgatcattttcacaatattgattctacccatccatgtatatgggatttgttttcatttgtgtcatctatggtttctttcagcagcattttatagttttccttatagaggtctttcacctccttggttaggtagattcctaagtattttactttttatttttgcagttattgtaaaaggggttaagttattgatttgattctcagcttggtagctctttgtgtataacagtgctactgatttgtgtacattaattttgtatcccaaaactttgctgaatttatttaacagttttagagggtttttggatgactctttagtcatccaaatgtctctagggttttctgggtacacaatcatgtcatcagaaaacagcaacagttggacttcctctttagctatttggatgccctatatttttttctcttgtctgattgctttggctaggatttacatactattgatataggagttaaaaagaaattaggcagatagggatggtaagagagtcctcaataaggttttccttttaatggagagcagcagcccccaaattatctcttttctgacaaagagcagcctgttaaattgaactgcagacatagataagcaagctggaagcttgcatggatgaatgccagcagctgcaccaacagaaaaaggctacctgggggcaaggcatgttcaacatagtggctccatctgcccttttctttgtcgagcacatgtacagtaagaaacagacaacatggcactggccaggtagagaacccatctgcataacaaaagattaggatggggtgaccaggttattcatgcactatgtaaatggcacacacagtcccatcaatctttaggccctatgtaaatcaggcactgcctcctcaagccagtctataaagctccgtgcactttgccgtggactggaagacccatttgggagcccttctttctctgcagaagagagagctattctcttttctctttcttttgcctattaaacctccactctgaaacttactgtgtgcctgcatccttgatttccctggcatgagatgatgaaccatggatatttaccccagacaatgatgctgcttcagtatgttgaataaaagtggtgaaagtaggcatacttgtcttgttccagttctcagggggaatgcttttgatatggtttggctgtatccccacccaaatctcatcctgaattgtagctcccataatgcccacatgttgtgggagggacccagtgggagataattgaatcatagggtgggtctttcctatgctattctcatgatagtgaataagtctaatgagatctgatggttttataaaggggagtttccctgcacaaactctcttttcttgtctaccgccatgtaagatgtgcctttcaccttccaccatgattgtgaggcctcccaagccatgtggaactatgagcccagtaagcctttcttttgtaaattgcccaatctccagtatgtctttatcagcagcatgagaacagactaatacagtaagttggcaccagtaaagtggtatgctgctgaaaagatagccaaaaatgtggaaacaactttggaattgggtaacaggcagaggttggaacagtttggaggattcagaagaagacaggaaaatgtgggaaagtttggaactccctaaagatttgttgaatggctttgaccaaaatgctaataatgatgtggacaatgaaatccagtctgaggtggtctcagatggagatgaggaatttgttgggaactggaacaaaggtgactcttgttatgttttagcaaagagactggcagcattttgcccctgccctagagatttgtggaactatgaacttgagagagattatttagggtatctggcagaaaaaatttctaagtagcaaaacattcaagaggtgacttgggtgctgttaaaggcattcagttttataagggaagcagagcataaaagttcagaaaatttgcagcctgacaatgtgatagcaaagaaagtcccattttctgaaaagaaattcaagacagctgcagaaatttacataatttacctaagtaatgaggagccaaatgttaatccccaagacaatggggaaaatgtctccagggcatgtcagaggtcttcatgacagctgcgaccaacacaggcccagaggcctaggaggaaaaagtggtatcaagggccagacccagggttcccatgctgtgtgcagcctaaggacttggtgccctgtttctcagtggctccagccatggctgaaaggccccaatgtagagcttgggccacggcttcagagggtgcaacccccaagacctggcagcttccacatgatgttgagcctaccagtgcacagaagtcaagatttgaggtttgggaacctccacctagattttaaagtatgtatggaaacacctggatatccagatagaagtttgctgcaggggcaggcactcatggaaaacctatgttggggcagcacaaaagggaaaaggggtgggtgcctccacactgagtcctcattggggcactgcctagtgctactgtaagaagagggccactgtcctctagaccccagaatagtagatccaccaacagcttgcactgtgcacctggaaaagcacagacaatgccaacctgtgaaagcagccaggagggaagctgtaccctgtaaagccacaggtgcagagctgcccaagaccatgggaacccacctcttgcatcagcatgagctggatgtgagacatggattcaaaagagatcattttggagctttaagatttgacttccctgcttgattttggacttgcgttggggcctgtagcccttttgttttggccaatttctcccatttggaacagctgtatttacccaatgcctgtacccccattgtttctaggaagtaactaacttgcttttgattttacaagctcataggcagcagggacttgccttgtctcagatgagactttggtctgtggacttttcagttaatgctgaaatgagttaagactgtgggagactgtggggaaggcatgactggctttgaaatgtaaagacatgagatctgggagggaccagggcagcatgatatggtttggctgtgtccccacctaaatctcatcttgaattttagctcccagaattcccatgtgttatgggagggacccagtgggagataattgaatcatgggggcgggtcttttccatgctattcttgtgatagtgaataagtctgatgagatctgatggttttataaaggggagtttccctgcacaagctctcatttcttgtctgccaccatgtgagatgtgcctttcaccttctgccatgattgtgaggcatccccagccatgcggaactgtgagtccattaaacctctttcttttgtaaattgcccaatctcaggtatgtctctatcagcagcatgagaacagactaatacagctttccacttttccccattcagtatgttagctgtgggtttatcatagatgacttttattacattaaagtatgtcctttctatgcctattttgctgagggttttaattataaagggatgctggattttgtcaaaggctttctctgcattgattgagatgatcatgtgatttttgttttcaattctgtttatggggtgtatcacatttattgacttgcatatgttaaaccatccctgcatccctggtatgaaacctacttgatcatggtgaattgtctttttgatatgctgttggatttggttatctagtattttgttaaggatttctgcatctatgttcatcagggatattggtctgtagttttcttttttgtcatgtcctttcctgtttttggtattagaatgatattggcttcaaagaatgatgtaaggagtgtttcttctttctatatcttttggaatagtgtcaatatgattggtacccattcttctttgaacatctgatagaattccgctgtgaatctgtctggtcctggactttttttgttggtaacgttataattaccatttcaatctcactgcttgttattggtctgttcagagtttctattacttcctggtttaatctaggagagttgtatatttccaggagtttatctaggttttctagtttatttgcataaaggtgttcacagtagccttgaatgatcttttgtatttctgtggtatcagttgtaatgtctcctgttttatttctaattgagcttttttggatcttctctcttcttttcttggttaatcttcctacatggtctgtcaattttatttatcttttccaagaacaggtctttatttcatttatcttttgtattgttttggttgtttgtttcaattgcatttagttctgctttgattttggttatttcttttcttctgctgggtttgggtttagtttgtacttgtttctctagttccttgaggtgtgaccttagattgtctatttgtggtctttctgagtttttgatataggcatttaagactatgaactttcctcttaacactgcttttgttatatccaagaagttttgataggttgtatcactattatcattcagttcaaataatttttaattttcttcttgatttcattgttgacccaatgatcattcaggagcagattatttaatttccatgtattggcatcattttgagtgttcttattggagttgatttccaattttattccactgtgatctgaaagagtacttgatatgattttaattttcttaaatttgttgagactcattttgtggcttatcatatggactatcttggagaatgttccatgtgctgatgaatagaatgtatattctgcagttttggggtagaatgttttacaaatatctgttaagtctatttgttctagggtatactctaagtccattgtttctttgttgactttctgtcttgatgacctgtctagtactgtcagtggagtattgaagtcccctgctattattatgttgccctttttaaactcctatgtgtcaattaaagacaggctttttccatctagtgaatccaccattccccagggccttagagtcctaccttagatgggaaaactagaccctcatagacggccaattgctccttcacatctcagtccagatgcatggggcccagaaaatgtagttcaatgatttgacaagaagagaaaaatgttggtattagggagttctagaaatctttgccttcagattacagaagatagcttttatcttccgactatattttaaaatttaaatggtattaatgatattaatggttactaatgtctttctctgttttttcatgccattctattttatatgtaataaagaacttaatatgctgttacttttcttgcctttctcatctgctgttttcaatgttcagtttattattattgttaatattgttgttatgatataatttttttatgcaactattttctctaaatagcttcagtacttatcagcaattcttaaactttcccaatcttgagttctggatcttgattaatctttctgtcttctgaagaagattattggatagttttatcatgaaacttaaaaagatcaattaattagttttatgttctctaaatgtttggtgatataagaaagtatttctctcatctttgcacattctcttaaatttgcccaaataagaaagtatgtctgttgtttttacacataagtaaccatttaaatgtgtataaaattcttggattaaactatttcccctcaaaacttgttgaaattgttccattgtctttcaacatttgacattccacataagaagtttgaagcttatctgatttttttctcctttataaatgttcctaatttttggtttacctttaaaatgtttcaatattccatgatatgtctatgtttggatatattgtgattattttggagaaaactgtattagtctattcagtttgtagacataagtcattttgggtaaggtttattggggcatttcatatccataattatttattgcatttatttttaaggtaattagactttttctgttctcgatgtctataatttttactttcactgatgtccttgtcattttcctgttaattctttgatattgtgcatttttaactctgctcatttctgctttcaacgtacgttttaattctgccattgctttacatggttccttgctctcctttcttatttaaggcagacccctttacatctctgtctttgtggctgtctttttatgattttacaaacctacttcatagaggcttctttttcataaagtaatgtcccttttttatttttggtacaccatgcaaatattttataaaacctccatcccattgtcatagaagtaatatacacaaaacttctgccttggaaggttctagacaagatttcccttgtcttatgctaggaagaagccttgtaacttatgtttttctatttaaaaaaggagagatacattcagacccagcttttctcaatagacagggagggtgaaatttacttgcctcttcattcagctgtttccatgttaatagccttcctctctcagaggtaaaatcaaggtcatcagcctttaattttgtgctggtctattgaactgaagatgtatcttctgtttcttagatggttcactgacttaggaagagtacatcaaagtttaaagaccttatttgagcaatgaaaaagatgcttctatgcatgtactgctcccagaacttctcatgtgataaccaggaacatgtataaaattgtatgtgtttctacatttttctatgttttggacttccaagtgtaacatccacatgagtggagaaacaagtgttgaagcaaatgttggaaacagggagaataggccagaaatccggtacttgttacccagaagtgctgcctgtttctgttctcaagagcctccatatcatgcagtaagacataaacaatggaacggaatcaccatcttttcctgttgtcctaggttctgttctgtttcagagggactggcatacggtgcatggctaagaaaggacatttaatggggtctcatccagacattgacatgtgatctttgctcatcttgaacttgtgctagtggaaatatatttaatgtatctacataggtatattaattggaacttgatagtgcagataacaggcacatttaataacccaagtgaaattaatttatatacgtaagtgaagtttgaaagcatttcattaatattatatctttagggcttgactttataatcagcctgctcacttaacaaactaaaattcaacataaactacaaatctagtacactttgcattataccatagcagccacaaattaatgagtaataaataatgctgtgagacagtagaaaatgatgctagtaacagaagaaacgtttgcactcactacacccatggctttgctgtacttgacgaatattatcattcaggaaaatgttaagggattttaatagtcagttcctgccgatgatcaataatgacctcattattgcatgtgcttacatttttgtgacatcagaggaaagaaacactgcaaaacccagaattttccaaattaattgctaaaggtcttccaatacaaactcttccaactacactggcacatcatacccttttaactatttctagagctaaagtgaaagcagtagtgtatttaggaaaaacaaaaagaaaaacctagtattcagtttttatgcaaaatcaccaagactttaatgtaaaggggtcctttaaagaaacatactattctcaaagctatattactttatatggccatatgctgggatctcacatataagtgaaattggacttcaatagccataaggagaaatgccactttttcctcccaatccttggactaatgctgtttaactttttttctttttttttttttcctgagacatggtctcattctgttgtccagcctggagtacagtggcacgatctcagctcaccacaacctctgcctcctgagctcaagccatcctactgcctcagcttcctgagtagctgggactacaggtgtgtgccatcacacctggttagtttttgtgtttcatgtagagatggggtattgccacgtttcccaggctggtctcgaactcctgagctcaagtgatctcagcctcataaagtactaggattacaggtgtcagccactgtgcccagcctgagcaatttttgatgcataatttgacatgaaatttcagaaggcttgtaagccaacactccacccccatcctaacaaactaaggtaatcgtttctgcttaaaagtctctgaaaataatactgatgtaagtagagcagcataatacttcctacctaagaaaatatggctgttttcatgttctcttgttaaagaatcattgtgggcagataatgagaagcagagcctaaggaaaagaatggataaattgggaggaagaggagaaaaaataatagactggtctttgaaaggataagggttgaagaattgatgagttatatttgcaagacagttagtgattgattttggtatcttttaaaggcttctctacattatagaaacacattgaactagaagagaaggatgagagccctgataaaaatttaagtattatcctgagccagtccttaaggggagcatgctatgtagccctgctacattgacaatgtatataaaaggatatctttctaagcatccttctaggtatcagttagcgaatgttgttagcaagttaaaaaaatgtctctaggatctgtgtcaggaaatgctcttatttgtattagcctagtcttctctctaagattatgttacttatgagcagaagttgttctatgtactgtatactttcattttcatcttagtttcctttcataagtgttatatcaaagttctgatgattcattgaataattataagtagcaaaattaaaatatttaaaggaaattaaaaagatgagacttttataagactcatattcctacataagactgcaattaattatgagattgggaaaaaacgcaaattattaaaaaataaaaactgaccaggtgcagttgttcatacctctaatcccaacagtctgggaggctgaggtgggtgaatcacttgaggccagaagtttgaggccatcctgggaaacatagcaagaccctgtgtctacaaaacactgataaaaattaactagtgtgatggcctgagcctgtagtcccagctacttggaaggctgaaacaggaggatcgcttgagcccaagacatcaaggctgcagtgagccaagattacactactgcactccagcctgagtgacagagcgagactctgtctcaaaaataaataaataaaataaaaactatcaccaccagcaccaccaaaaaggagatctcataagctttttttaacatttccaaaacaaaggctctctaaacttctttttttctcattctagaaagctaatgatagaattttttttttcccctgaaagcctcagctacattcaccatgtcctgcatttattgttgacagctgttcaagacctacaaggtgaagttgaatattacacacttttttggagttctgctacctcaaacgactctctaaaaatcttgccagatgtaaactctcatgtcattggccacctaaagccaaacacagagtattggatctttatctctgtcttcaatggagtccacagcatcaacagtgcaggacttcatgcaaccacttgcgatgggggtgagtccagattctaaaggatatttgcctcagagatgcgaatgaaattgattgattcttgccggggttgagatcagtcatccctccattataaaatttccggtgtgggagggaagggggtggaggctaaaatgcttaagtgctcactgtcatcagtagcagatcaataagcagtcccattgagacagaagcacaagctctaataatgagatattagcccagtttgttcctgttcttttcagtgtatacttattttagaactgagttcacatcaataaatggtgacatttagaaactttttttttaagatttgccctcagaagcagtacgtttttcaaaacgacagccaaacacagtgagagccctccctgagtcaccagaaatggtaggtggaagttcagccactgagaaaaattgcctgtgactcatttctaagccagttagcaagggggaggaagcaagggaagcaacttgtgaatctgaaatgtgtttggaatggtctttctaatcttttttggctttataaagtctcattataaacattataatatcattacctcccaagcaagtgttccaggtcattagcagagctctttaagtgtggaacccatttccctttgtggtgccaaaggtcggcaccttttgtttataaaatagggtagatcacaaggacaattcttcaactagttaagatgggttcttatgataaaaataggtctttgcatagttatttctgacatgcttgaataattatgcaatttaacgctaagcaagatttttttcttatgttagatttcatcattacctatggtaatcaacattcaaaatcatttacataatgacaatattgcattattgcttcatattgcttgagttacaagctagtaacatcaaatgatttttcacgttccaccagcctcattgtatttgagttttattttttgctcaaggagcaaattttatttccttccctccctcccctgcaccttggaggtatagagtgaaaggatggaaaaaagacaaaaaatagataagtgttagtggtgcagatgggtgaataatttatcatcatatcccactggtcacatagtattgaagattagcactatgctggtggtataaagcattttaccaccaattcttatggtttctaactgagagtataataagccaatttacagaggactacagactgtgataacttcatcagcgaaaagcagataagcgaggaaccctttgctaaacctaaatactaatctgcatttagcttaacatgtgctttttcagagacagctggagtttattcagtttcttcctttaattctagagcctcagggcatgcttcctccagaggttgtcatcatcaacagtacagctgtacgtgtcatctggacatctccttcaaacccaaatggtgttgtcactgagtattctatctatgtaaataataagctctacaagactggaatgaatgtgcctgggtcgtttattctgagagacctgtctcccttcactatctatgacattcaggttagaacattgttttttgatggttaggcttatggatatgttaaataaaacatgccaggctatgtcttcaagtggatatcttctgtcttggttacagattatttctttggtggggaagggaaaagagagaagggaaattgatcagaattaaatctgtgtgctgtaggcaaacatgtgagtctctggagagaagataatgataatatggaaaacgatggtgatgaggatggtgatgaaattctcactggcaaaataaagctaatcatgtattctaaataaatcttgttgagcagcttaccttttcccaggatcttttactgaaatcaaaatcagaatcagtttgtaaatgtggagatgtttttttctcttcccatttctcctatttactaatttaatatctccagagaagttatgaaacttcacttggtgtcaatttcctcttttgtaagcgcaatggactagatgtcttaaaacattctagccacctctagcattctgtgattctgaatgcaacaggaagacatatataaaaaatatagcagacaaaaaatattaaaaggttttatctgaaggtgaaagaaatatatttattcatcactcaaaaaatgttcaatgttctccgcatatgtgagagcaattgtggttaaaattttttgcccttggacttctttgagaatcttatgaagtcagtgtactctgccttagaaaaatatttatgcacttgtatgacaaaatttaacacataatttcagaaagtgcactgatcacttgaagtcaaattcatagacttcttcaggggctactggccttaaaagtagaaaaagtatagggaatactaaggcatataaaacaaggaacttatcttcacggaattggaaatcttgttggagtaccaagccataaaagataacaaggctaaatgtgcaaatgagtgataaaaaaaaatcagagtatttcagaaaccccacatttagagaaagcttgcaatttacaaaattttttaataaactatgctacttctaaaattcataagagcttcgtaagataattttcagaagatattaagcacagaaattttatatgaccacagaaactttttactggttctatccatttaatagtactacctcattcaggtttccatctccttttcctgacatttgaggttaagacatataatcatctggctacaaccaacactttagtctcccctactctgactcatagacctagcttcctaagaaaaccaaataaaaatatctttgaataaagaagaaaggtacattaattatttttctttttttttcatttaaatgtattttattttaagttcctgtatacgtgttcaggacatgtaggtttgttacctaggtaaacgtatgccatggtggtttgctgcacctaacaacccatctaccaggtatttacctgtacatgtattattagctatttattctgatgatctccctcccctgatgcccccccaacaggccccagtgtgtgttgttcccctcgctgtgtccatgtgttctcactgtacagctcctacttataagtgagaacatgtgatgtttgtttttctgttcctgtgttagtttgctgaggataaaatggcttccagctccatctatgtccctgtaaaggacatgatctcattcctttttatggctgcatggtattccatggtgtacatgtaccacattttctttatccagtctataattgatggacgtttgggttgattccatgtcattgctattgttaatagtgctgcaatgaacatatatgtgcttgtatctttataatagaatgatttatatttctttgggtatatacccagtaatgggatggctgggtctaattgtgtttctggtcctaggtctttgaggacccaccacactgtctttcacaatggttgaactaatttacattcccaccaacagtgtaaaagcccttctatttctccacagcttcaccagcatctgttgttacttgacttttcaataatcaccattctgactggcatgaaatggtatctcactgtggttttgatgtgcatttctgtaatgatcagttatgttgagctccaggtgcccaccaccacaccaggttattcttttgtgtatattttcagtagagacagggtttcaccatgttgaccaggctggtatcaaactcctgacctcaggtgatccacctgcctaagcttcccacagtgctgggattacaggtgtgagccactgcacccagccaagtatctactttttgaataatccctttatatgtcccttttacaaagaaataataatttcatttttattcagttttacctctttttaatataaatatagtaagctttatatgtttgttggccgcataaattcttctttggagacgtgtctgttcatgtcctttgcccattttttttgatggggttgttttttcttgcaaatttgtttaagtttcttatagattctagatattaaacctttgtcagatggatagattgcaaaaattttctcccattctgtaggttgcctgttcactctgaggatagtttctgttgctatgcagaagctctttagtttaattagatcccatttgtcaatttttgcttttgttgcaattgtttttgatgtttttgtcatgaaatgtttgcctgtgcctatgtcctgaatggtattgcctgggttttcttctaggatttttatagttttgggttttacatttaagtctttaatccatcttgagttactttttgtataagatgtaaggaagggatccagtttcaattttctgcatatggctagccagtttttccagtaccatttattaaatagggaatcctttccccactgcttgtttttgtcaggtttgtcgaagatcagatagtggtaaatgtgcagtcttatttctgagatctctattccgttccattggtccatgtgtctgtttttgtaccagtaccatgctgttttggttactgtagccttgtagtatagcctaaagtcaggtagtgtgatgcctccacctttgttctttttgcttatgattgtcttggctatacaggctcttttttggttccatatgaactttaaagtagttttttctaattttgtgaagaatgtcattggtagtttaatgggaatatcattgaatctattaattactttgagcaatatggccattttcatgatatttattcttcctatccatgagcatggaatgtttttccatttgtgtcctctctgattttcttaagcagtggtttgttttcattgcacaccatgattcccatagcctacctgagttgtcttagcatggaatatgtggactgatgtttatgttcatgattcttatggtgagtccatgtatgcaggtagaccataggccaaattatgaaatagaaatcatgctccaaataaattagaaatatagctatataaaaaaggctaacacaggaaggtgatggaggatttgccgtattgtcttcttttgaccagtgttcgggaaagctgagttttcaaaggcaccttattcatttgctttaccaagactcgaaacacacaacctagaagtgagaacactgtgtgctgtgcatgcatgtgcagctcagctttctgactctggatcaagagttaacgtttaaaagtgtttaaggcctattctatggaaaaggctttatttataccactactggtttgagtcaggtataaataactcaagccagtaggtataaagcctcctcttctggtagcctgaggagagtggaaacagatgaaaatacaaaagatcaaagtagaatccaataatagaattttgttattagtgcctaagatattcttattactgattactatattttttgtgaagctttttgcagtccaggaatactgtacttgatatagctgttgcatttctggaaatttgaacatcaaatttcagtgattttcattacgatgtcaaaggtgatttagtttcatttaaaataagcatttgattggaatgcctaatactttagaattaaggctctctatgctaaccccatctgtaaaatagctattgattttaaagcacataacacactcaagtatctacttttttttttttttttttttttttttttttttgagacagagtctcactcttctcacccaggttggagtgcattggcacgatctcggctcactgcaacctctgcctcctggaatcaagagattctcgtgcctcagcctcccaagtacctaggattccaggtgcccaccaccacaccaggttattcttttgtgtgtattttcagtagagacagggtttcaccatgttgaccaggctggtatcaaactcctgacctcaggtgatccgcctgcctaagcttcccacagtgctggaattacaggtgtaagccactgcacctagccaagtatctactttttgaataatccctttatatgtcccttttacaaagaaataataatttcatttttattcagttttacctctttttagtataaatacagtaagctttatatttgtgtttcattcacatgttatacaatatcgttttagcactagaaataggtcccaaaatggagactgggaatgttaacattagtaagaataaaaacatattggcacatttctctaacatttgaggttaaaacatatataatcatctggctaccagcagtagtcattggtcattttcctttgaccaatgaatcaaaagaaatgttttctggagaaacatttgaatatacctaagtagtttagagcttaaagttatgtttaacatttagatgagaagccagtagggtacagtggagaacaactcagatatcccaaatcttaccagcttgacaatattccctggcttctctgcaaatttgtttaaatggagttatgaggaatcaatacgattatttgtgcatatatccattataatatttggcacatattagatacataataaattcagttgaattgattctgggttatctcattatgtatcacagaatcaaatttttccaatatgtataaagttcattttcattaattatattacagcattatattttaagttcatctgcctttatttcagatttaattggacatgctcagaatgtaggcccttgatagtgtttaaatatccactattaatacctcaaaagactatatggcatcaataagtaacacaactcatacagcattatgaacatatgcctcaactaacatttaggtaccctatgaataaaatagcatatctagtaaatacaagaatcccatttgcctttcctcaaccaccaaaggaacagagaactgtttcacataaaagctcggaattaatgtttaagattcatcagtacctagcttgccttctctatttatatattagatgcttaaagtaaattagcactgtaaaaagtacagtttctctttggtttatcctttaattgagagcagaatgatatcgctttgcagatgttcccaatcttttgcatattcatttctctctcctccctcttggttaacgtgttccttttgtgtgactaatgcttgatgaaccccatttctaatcttcagttattccaccctcctcggtttttattcagattaggtggcagaattaaagggatgaatgatgattttctgctgtgattaaggtaaaaatacaattgcatctggaacaaatggatataaaatacctcagccatattggaaggcttctctaggcctcatttttcctccattagacattagcatttaggctatttgttttacagtgtcaagacttccagaagataccatcattacactacttagttatagatttagagaacagtgagcagtgataacctgttatgcttgcaaactgtcacttgggcatcttccattccttgactatgctcttcagtagattaatgtatctttctctttgtgaatagttgcaaccagagagtaaacatcatcattcccattactaaatcaattatcttgatcccaattccgtaccttcctctgagctcattcctttggagtcagttaacatcaaaaatgaatattgattaaacctcaagaggctatagagaaatacaagagattcatgtgaaatgagggaaggtgggattcagactattgttagtaagtatttcaaaaatggttgcatttattttttctaaactaatgtttgcaggttgaagtctgcacaatatatgcctgcgtgaaaagcaatggaacccaaattaccactgtggaagacactccaagtgatataccaacacccacaattcgtggcatcacttcaaggtacaaaattttgtgtcagttaaatctaaggaactctgatcagaagaaatgaaaataaaaatcaaaggtatcctctcagccatgacaatctcatttaatgggttattataagtatgtgtgtaaatcaaatttttgatattatttcacagatattaatcttcactggacatccaatggcatttaatctttaatttccctgattgcccagcctcagatttcttatttagtaacctgtaagcaaatacttgaaatacatgtctccttatttgaatgtgtcctttagtgaatccttttgcggagcataatacaagcttaattgtaatgactaccttctaacttaatctttttgaaaaaaaattgatttatatacatcagagtgccctaaagctagaaatctgtaaaattagtagggcagataatgtttagataagcattaccaattttgtcagcttcttggtagaatcactttatttttctttattcttttgttgctgagaaatgaccatagtttgaaagcgagtctctttataattcataattagtaacaacaacaataataataatatttggtattgtttccaaagctgaaaataagatggtaaattgttcatccgtttgtatcaagttgaggctgggaaaagaaatcttagtgctttcacattatactttttgcttaagccaaatgaatcacccttctcttacatgtgcaaacaacacacacacacacacagacacatacacacactgaaataataagtctattattaatgtttcaattctgaaggatttctctatgacatgttgaaatttctggatcttaaatcagttcaaaaaattagtactggttttggcaaccaatggttaaaataattagaaaaattcaactaacctgactgttagctgttcgtggcaataatcatatcttgtctgcttgagtatatcttctatcaaacacatgatagatactgatctaatttttggcatactaattagtttataatccccccagcagatatcccccaacctattcacagtattatctactatgcagggaggaaatagtcatattaaatgggcgttagagacctttattctttagcaaacacatctgtggctataataatatagaaggcaaggtggggcgtggtggctcacgcctgtaatcccagcactttgggaggccgaggcgggcggatcacaagctcaggagatcgagaccatcctggctaacatggtgaaaccctgtctctactaaaaatacaaaaaattagcagggcgtggtggggggcacctgtagtcccagctactcgggaggctgaggcaggagcatggcgtgaacctgggaggcggaacttggagtgagccgagatcacgccactgcactccagcctgggcgacagagtgatactctgtctcaaaaaaaaatatatatatatatatatatatattatatatatatatataatatatattatatatatataatatatattatatatataatatatattatatatatatatataatatatatacacacacacatagaaggcaaaagtaatacaaaagagcataagacatgattctaaatttgcaaagttccagtccactggggaagatactcccctaaataaatgtttatagaacaatgtaaaaaacactataataagaggtttagatgtgcaagaacataaagagaaaaatagcaaactttacccagaattatcagtgaaggcatcatggaagatgtgacctttgacttcagtcttgaaaagctcaaggaagaattatagttaggtgggtggatgttttcaaattcttgtctgctggcatccccatgactcaagcccatgtgaatgacgtaacagaatatgcctcatagtacatatttatttataactaaaaataacgtctaagctttataagaaatggaacaaatgtgactgtgtctctaggttttttttcctttaagaagattattgcacataataacagaggacaaatatttttagttgctattaaaaattgcttgtatccaaatacattaaattgatgacagaaacattaaaaagagtattatacaacaagaacaaggaaagtgagagaggagacaacaacagaaaagagattgcaacacaattttgtaagcaatatttgtcagaaagaagcaaatgatttaatacagtggagaaatttacaaccaaaatattggttgacaaaagacaataatgacaggaaacaaactgttttttccacagagaactggagaggctgagcacttagaagttttaaggatgtaaagaggaggagagagggtagggtttaaagctgaaatcatggggtgagacacaactgttaacaaataagtgtttggaatcccaggtctcttgcatctttgctgtgcatccaggggtctatttctcttcctccacatgacaaagtccaccgaccaggagattagacatttattctctggagaaactgagggctactaggcagaggggagctgagatgagacacagaagtaaaaacagtgataaagtgagactacaacctgaatggtgggctttttggctaagtttcccagttctgccctcaaaagcaagtagacaagtcataaacacctccagataggaaactgaacatagttttctagaaaaaaaagaatgatctcaaaaaaaatacctccagataatagcatatagggatccctaacagtaaaaacaacttgtcctctggtcacccagtagggaagtatgccaatcaacaaggctcacctaactataaagcttttagtcagctttttttttttttttttttttttttggtgcatcactcttaaagataaaaaggggaccaaaataaacaaaagacatgatacaatagattcagagataatgcaggtgaggaaaaaaaattatagcctcagacagataaaagaaaattctctaaccataaaacaaaaccagcatacttaaaaaaataaataaataaccaacgaggagaaaacttcatggaaattaaaagggtgaaaagctgaattgaaacttttgaagaaagttcaagggaatgtctctgaaaatgcaatgaaacacaaagatttaaaagagagagagacaaagaaaaaacaatagagagtatccaggaagtctaatatttgaataataagagcttcaaaagagaatcaaaggaaaagagggagaaaatttaaaaaaaaaaaagacaagaaagtatcccagaaccaatgtactactgtgcagatcaaaagattccctggataccaacaatatgactaaaaagtgattacatataaagggatattatcaggaaattgcagagtaccatgtttaaaaagcacatccaaaaagctgccaggaagaacagacactaccacaatcaggatgtgaagcagcatcatgatgtcggtctccattattgctaacccctcttctacccttcctaaaactaagcaaacactgccatgttttgttatgtataattctgccttttccatattgtcatgtaaatggatcacataatatgtagccattcaaatggcttcttttagttagcataatgcatttaagatttgtccatcttattatatacatactagcagttgtatacatactagtagttgtcagtttttgttgctgagtaagattccattatatgaaagttctacagtttgtgcacagtttggataattttcagttctccgtgaccacgattaaagttgctgtaaaacatctatatacaggtttttgtgtgaagatatattttcatttcatgtgggtaaatacccaggagttggattgctgagtcataaactgccagactgatttacaaagtgactgtaacatctttcattcctactagcattgtatgagagttcaagttgctctacatttttgctagaacatgagatactatgaggtgttttcctcttattttttaaatagtcattttaatagatgtttgtggtgtgttattatggtcttaaattacattttccctaatgactaatgatactgataagctttgcaattgctttttgcatgcactttggcatttgtttactctgggaaatggtatctccaaatcttttgcaaatttcttaattagattctttgttttcttattttttgagttttgaaaattttttaaatatattttggatttgagtttttgtcacatatgtgatttacagatatttcttctctaccttatgatttgttttcaattatcttatttgtgtgtttttaagagaaagagttttaactttccaagagagttagatttgttactttttccttgacagtttgtgcatctggtattttatctaagaactttttgcctgagttaaggtcacagagactttctcttgtctatttcctagaacatttgtatgtttacatgttgaatttatgtctatgattggttttgtgttaatttttgtatacactgaggcatgagtcaaggttaattttttttggcatgtaagtatttaatagtatcaacaaaatttttggaaagattatcttttctttattgaatatttttagatttttgtcaaaaatcaatttaaacacgttttgtaggccatttttggactctcttttatgttcaatttatcaatatgtatatctataccaatatcgcacaatcttgattactacagctctatagtaagctgtcaaatcacattgtatgagtcctccaactttgacctttataaaaatcattttggcctttctcactactttgcctgtccatataaatttcagaaacaggtcattgatatctacaaaacatgtgattttgattagaactgcattgaatttgtggatcaattggtagagaattgacatcttaacaatatcaaatgttctgattcaagaacacactcttgctcatttatttgcatcttctttcctttattttatcagtgttttatataatccagtatgcaaatactgcacatattttattaagtttatacctaattacttatttggggggtgctattattattgtttctttaaaacaaattcaaatccaattgttgctagtgtgtagaaacacaattaattttggaatagtgagcttacatccagcaaacttgctaaactccttgtaagtcttaagagcttttttgtaattccctagtctatatagatcttctacaaagagaaactgtttatttttttcatttccaatcagtatgtcttttatttctttttcctgccttattgcactggatagtttaataacgtgataagagcatatccttgacttgttcccaatctttgaaagaaaactttcagtcttttacccttagatgtgatgttacgtatgaaatttttggccatgccttttatcacgttgaagaacttactttttatttttaatttgctgacaattttcattataaatggacatggaaatttgtcacatgcttttttgacattttaaatttgtactatgatcgattatatttactgattttaaattattgaactagtttgtattcgctggataaccagaacttcgttgtgacatattttcttcttcatatattgggggatgcaatatactattatcttatagaaaatgttcatctgtgttcataaaatatattggactgtgtttgattttcttgtaatacctttgcctggattgggtatcatggtaatttctggtctcatactaacttgggaagcatttccttcttttctattttgtggaagagattgtacaaaagtgttattatttcttaaatcttggtaaaattcaccagtgaaacccatatttgcctggagtttttctttgatggaaggttttttaacttggaattcaattcccttaataatgtatgatatttggcaatttattctccagtgagtttagtcatcttgtgggtgcagaaaataggttaatttaatcaaatttgtcaaatttattagcaggaagttgtttgtagtatgtttgtactacaaacaacaatttgttgcaattgattttattctttcatttctgatattggtagtaagtgcccccgtttttctgttcagcctagagttttatcaattttgtagatcttttcaaagaaccatttttggctttatttattttctatatcatctacattgttttctattttccatttcagtgatttctgctctctattgttttcttccctcttgccttgctattgcttctctagtttcttaaagatgaaaactttcattattgatttgagacctttcttcttttctctcagtcctgcttcggtatgaagctcacaaattttgaaatgttgcattgcacttcatttattcaaaatatattttaatttctcttgagacttctttaacccatggattatttacaagggtattgtttaatttccaagtatttggggatttttcagataagtttctatctgagtttccagtttaattctattatgatctaagaacataattttagaattccaattcttttaaattagttacagttttttcagggcccagaatatgatctatcttagtgaatggatgtgcacttgaggagaaggtacagtctgttgttgtcagatagagtgttttgtaaatgtcaattagatcaagttgagtgataatggtgttcagatcatctatatacttactgattttctgcctgcttgttttatcagttattgtgagaatggtgttgaagtctccaaatgtcattgtggctttatctatttcttcttcagatctattagtctttccttcatgtactttgatgttttattattaagtgcatacatgtttaggattgttaatgtcttgataaactggctcttgtatcattatgtgataagcccttttacttcctgataatttccttgttcttaagtttattttgtctaatattaatatagccactccagctttcaattgcttagtgtaattctgggtgatttttcgattgattccttcacattttgaatattacgttataaaaatctgactcctgttaaaatcctttgaagaaagttagagttcttatttacttttttcagcaggttaccaactggttagcttcagactccaaattctgttttcctttgccagtgactacagtcagttcctattttttcataaagtagcataacaaagctataaactttgctttactactctgtgtctgcacaatggctaatttgggatttggctgtagaattatgtaatagttctgatctcaaaatcttcgctgtgctgcttgcataggctatgcatgtgaggcaaccataaatgtgcagcttggagttgagtcaggacttgcgttcgttcattcataaaattagcttctagctttcttctctctgaaatgtcccccatctttccagctcctttggacttccttccctggatttttggctagaatgatatgatttcttttgaaatgtttgcctcccagcctgcctccaaatttgcataactggagttgttcttaggcaatgaggtaagaggaattcgagaaaaaaaaataacaaggacttcccccacattctttggactatagaggccccatttcctgatttctctggacagaaagatttttccccccgttggggctttagattccaatttggccacagctgccgcagtgcagctccttggctctgatcatcctcggagcagggcccagcagaaagaagacaaaacaaaacaaaaatgggggttttccctatactctctggcttgcaaggcattttgttctagatactctagccggaaaaaatttactttctctaggattttgcttccctagttcacagtttcacactgatactgcccttgggttaaagatgggaagtaaaggagggggaaaaaaaatgggaaactcaccctgtaacattcattcttaaagttttgtctcccctcctgatcagccttattgttagcttttcagagtcctcaggtagttactttatataatttttgcagatactgagttgtaatcagtgggagagataagctgtaatgggcttattccatattggcctgcatgggaagtccccctccaccacagttttctttcttccaatgcctttggcaactttccttttcccccccagtcagaagcctagcaaaaacttgatagaaatcattcataaccaaatattggcatgtaaaatctttcctttcttaaaatgatccatagtagcagagtaacattttccaaaggcaagactctaatgagcaactataggctgccaagccattaatcaaaattataccaacaccaaagcagttagccttgtgtgtgtatggtattgtttgtgtaatttcattatacttctggcaatgtatacttgttagttatgtttctattttggttttaaaaaatctttcatattagcaacatgcaaaatgaaatgtgaaatccttccagaaaaacatcagcagacggggtctacttctctagcatttaaaataatttggtttctaagaagccatacatttcttagattctttgtttatttttggtgaaattcagaagtcagtaaaatttaactcatatatttcaataacatacagatagcataccagcctgtttgattatatgcgtgcagtgtaccaactcatctttgtctttggccttaacttatgccttgtttttgactacatcttcagcagtacaagcccttatgcatgtttttcctcttatatataaaccaaagattccatagcacacaaataatatagaagaatcaaatggacccttctagttttataagctgctgcttcagagacaagccctgtttctacattgcattttccatacttctcatattatcatcagctccttctatatcccaaaagaatactaactactgatcgataacccggacatgtctggccatggcctacatgtgccctgggtagttcatttatttgtcttggtggatttgctagagtggaatttaatcaatagctaattcattaattctggtcctcgagaatgtagagactgacctggatgaagataacgggctgggtctggctttgatagaaatatgacaaacactgcagctgacagcttcactaggtactgtgctatgaagtttagttatttattccccataaatggagacactaagaaaataacacaaacaagaaagatgttttattacattactgttagtattccaaaatgcatcatttccaggcatgaggctcaagggaaagtagagaaagaactcagatcatgtcttttaatgtctttaattggaaccatggcagttttttcacatccaaatcagtttggggatgtgttattgataaggagtgtgaggtataaagtcttcgtagcactcacaaataattgttttaagatttgcttctagatgctgaatgagatcaatgatattcttatacacaaactttgcagaaatctttctgataacagcataggttagatgtctctaaatgaatgctaaaccactatcgttattaatgaatatctatatatttttttcttttttgttgttgttgttgagacaggatctcgttctgtcacccaagctggagtgcagctcactgcagccttgaccttccaggctcaagcaatacttcctcagcctcctgagtagctgggacaataggcatatgccaccacacccagctaatacatttttaaaattattttgtagagttggggtctcactgtgtcgcccaggctggtctttcgaactcctgggctcaagtcatcctcccgccttggcctcctaaattgctggtattacagatgtgacccacacagcacccggcatccccctatatttttaaattacttaatgtggggttaagtatggttcaagaggtcagagcttgtggagaaagaggattctccttttttcctcaccaaattttatgagacatgctatgatatactttttatgctatgacattagatatcagggaatctcttctatccttgattttttctgcctaacttttctcagtgaatgatagcttcaactgaagtaatgattttacagttttgtaaaattaaaagaaaaaattaatattttacatttaatttaattatttaacattacaagaaaaaattaaggccacatttctgtttgtttgctttaatagggagagtgttgggctgaaggatacagaatgtcaaatcacttgttttcacctgtataccaaacttgcttaccaatatgggcaattgtagactatttttaatatggactaaaactgtctgcttaaacctttaaaggatatgggtagaaccttgaaagagagaatttggactacactaagtgcaattcgtacagatccaatcaatagccttatggtcaccatggcttttaggaaatattactcatttgatggccatgagttctgattatcacattctgtttaaggagaccttaatagaatagtgtcagaatatagaatgtaaacagaaagacagaatatatagaaaagagaatattgggcttattattatggctctgctatcactattttcatttccttacctccctcttcttcccaaactcctcctaacttctttacctcttgtagctcccatagaaacagctcggtcgctgaagtagcctttgagtgcctttcagcaaaatccagttcttcctcctaattcactttagccctcaactgccactttgtccctggttctctaaacattcattgttttgttttgtttttattggttccattaaaaacccacttatgcattctgggtgtcctcaggaaaaagactccctaccttgctcaggtagttcagtcttgcaattttaagccatactgatgtctcaaagatctctggccctgttttcttcctaaactctaatcccacatacccacttgcctattgattttatgtcatgatattcacccatcacttccataaccatgagattcacaagttaattcttatctaactcatcatcttttccaacactcacttctgcaaatgtaccaccatcctgcatattatcgaggacatatatctttgaagtatttttaatcccctaagtttattaaacactgattttagtacattttctgttggagcatcttctcatatatgttactcttctccatttccaccactaccaccctggttcatgttttcatcgtttaagtttatataaccattttatggagctgtcttaatccaattagatacaaagagaaaaaaaaatcctttacttttcacctgctacttactgccttaaacacactgttttggctatccttccctcaattctcaaataccccacaggaacatcttatgggtttccaattatttttagttatgagtctcactttgataattaagattcatgatcaagtattaaaaagtccattccatcaccatcaaaatattagcctcgcatctagttcaaagattctatcatttctaaagctcaggcctaattgtagcttgctcttttcttccctcttactctttctttcctattccattttatccaaatatgttccctttcaattttattacttcactgccatcactgtttgacaatcacagctctccattggcaagtgatgctttcttgggcaattgtatgtttttcttgagaggtcctcatgagaatctttgaatagccaaattccctcacacgagtgttgccctttatagctgatcacttgtggtgccaaaagagcagaacattccaaagactcttcctgctggagtctcctcatgccagaaggccactgtcctgggccatgtaccttcaagttagctcaaacctagccatcttgcaaggcatccacttggctcttgagaaactcatccatctatgccatgctatagatcaatattgtggtattctaggcttaacctttcattgcagaactgctctggccaatctctggccactagaattctctaactgagaagtaagctttatttcctatgctcatacagactgccaaatttaagagttccctgtcaagctgtcccaagatctcttcaccacattttcctccaaggacaaaaggagggaaatgtgtgttcctttttattaaaagaacatgggttttgcattttgactttttacctactacaatttataataaacatctcagtaggataattaaatattcagtgacttgacttgaaagcaaagaattaaatttgtcatattacatttatttcatctttgttaaaagtgttctgatcatttttgataaccatgatctggaataatattgaagaacttgagtgttacataaatgattgacaaaaatgaccaaatcgattagaaaaaaagcctgtgtaaacataaccagataatctagagctatttaatccataacaatttaggttaatatcttagagtgtatgaagatttcttttctctggtcaaacaaaaatgttttgaaaaaattggggaaaaatattagaatgaaatgttaaagaatagtaatgtgaacctgtcttcataaaaatttgatctgacttgtatcattttgatattcacctgtgtaaaggtaagtgatatcaaattattttccctacactcctttgtatcttcaatggtattttgtacttcaagggacaactggaagtgatgagatctggggagggtgaaatgcatctgtaatcctaactagttgggaggctgagtcagaattgcttgaggccaggatttgagtccagcctgagcaacatagcaagatcccatctctaaaaataaataaagaagaaagtgatgacaactgtgggggtggcacaatagtatgtagtagtaacagtaataaaatagtaattctgctgacaatatgacataattaaaaagaaataactacaactagaatgtctgaacacttgatgaattcatgtaccaaaatatgtgtaaagaacttccagttccaaaatgatgacatagaagcaagctggcttcactcctctccacagaaaacagaaacaaatgtacagaactgagattatcacagcaatatcccagaactcaaatatgaggacaagacagttcccaaagtcacagagaagtgaaaatctccgagcagatggtaagaaaattggactttcatatccacaatgcccatctccccaatatattcagcaccacgcttgtggaaaatattttcctgacccttgatttctgcactggaaaagtgcgattgaagtggacagtttcccgaccgtcttaggttacctggcaggagacctttacctgcctcaacccacaggaagcatcaggagtgcccgaagggctctatctctgtgaggacatccagagacaatgtggggagatgggactaccatcaccagccctggaaattctgctctgtaactcagtaaaaggagatgccaaatcagagtggctgttcagcagcaccacactgtagtagttttgctccacaggtttcctgggcaccaatcctcagccagcctcctcacactaccaggatatcccctttggaacctcccctatttgggaaaggtggtattctgatagtttactggagacaaggcaaacctggacctgaggcaccatctagtgccaaaaaggaggcagtgacccagtgaattaaaaaaaatgaaagaaaatgaacagaaaaattacaaagaatctctatgcaaacatacctaagaaaaaccaaagcaagccagagaagactgcaataaataactaatccttcaatgcaaagacatagacatatatccataagaaatggagagaagagtaatatatgagaggatgctccaaaagaaaatatactaaagttgctgtttaataaattcagggaattaaaaataattcaaagatacatatccttgataatatgcaggacggtggtgtgtttgcagacatacaacttctttaaacagggaagtaggatcttctcaagctgacaaaagcaaggaaacagtgagtgaccctaacaagatggtgataggtgaactctatgaccaagaattcaaacagttttaaggaaactcatgatcaccaagatagtacataagataaattcagacatttctcaacagatttaacaaagagattaaaatggttcaagaaattaaaaaagaaatcttggatctgagaaatacatctgctgaagtgaaaaattcattagaggctctcaatagcaaactagatcagaggaaagcatcaacaaacttgagacaggctatttgaaaatacagagaggtggggataaaagaatgaaaacaagtgaagatcacctacaaggtatatagaaaactacctgaaaagacaaaatctaggaattattggtgttcaagaggaaggtaaacaagagcaagaggtagaaagctttttaaaagaaagattaacagaaaactttgtaaaatgtaagaaacagagaaatatccagatatagaaaggtcagagaagaccagatttgattaaaataagattattccaaggcatataacaatcaaattcttaaaggtcagtgacaaagagaggatcctaaaagcagcaagagaaaagaagcaaataacatatttaaaagcttcagtttgtttggcaacagtctactcaacagaaaccatacaagctaggaggaagtgggatgacattttcaaagtgctgaaataaaaaaacaaatgccatataaaagtactgcatacaataaagctatccttcaaatatgaaagagaaatgaagtccttcccagataaaaagctgaagtaatttaccactatgagacccatcttataagaaatactaaagagagttcttcaaactgcaagacataaaaaactaatgcacagaaagaaaacatttgaaagtaaacccactgataaattaagtacacagacaaacccagaatactctaatactgtaattgcagcatgcaatccactcatcacttcagtatgaagcccaaaagacaaatttatcaaaaacaatagtaggtacagcaacgtgttaagagatagacaacataaaaatatacaaattgagacgacataaagtcaaaatatggagaaatacagttaaattttagagttttttcattgtttctttgtttttggcaaccaagtacaataaccatatgatcatttcaatagatgctgaaaaagcatttgataaaattcaatatggctttattataaagtccctcaagaaactggatatagaaggtgcatacatcaaaataaaagccatgtatgacaaacctatggctaacattgtactgaactgggaaaaaatgaaagtctttcctggaagaactggaacaagacaaggatacccacttacacttttattcaacacaatactggaaatcctggtgaggcaatttgtcaagagaagaaataaagggcatccaaatcggaaagggataagtcaaattagccttgttaacagatgacatgctcttataattagaaaacctaaagactccaccaaaaaacctgttagaactgatgaacaaatttagtaaagttgcagaatacaaactcaatgtacagaaatcaatagcagttatatacaccaacagcaagcaatctgaaaagaaatcaagaaagtggtcccattaacaatagctacaaagaatataaaatacctaggaatcaatttaactaaaggagtaaaatatctatacaagtaaaactataaaatgctgatgaaagaaattgagtaagatacaaataaatggaaagatattccatgctcttggattagaagaattaatattattaaaatgacaattttacccaaagtaatttacagattcaatgtaatacatatcaaaagaccaattacattcttcacagaaatagaaaagtatttctaaaatttatatggaaccacaaaacacccagaatagctgaagcaatctgagtaaaaaaaagacaaagctggaggcattacactaccttacttcaaaatatagcacaaacctaaagaaaccaaatcaacatggtattggcataaaaacaaacacataaaccaatggaatagaatagagaacccagatataaatccatgcatttacagacaactcatttttaacaaaggaaccaagaacttgcaatgaggaaacagtctttttaataaatggcactgggaaaactagatatccatatgcagaagaatgatagaagagacagaagagatagacccctatctcttaccgcattcaagaatcaactcaaaatggattaaatacttaagtctgagacctgaaactgtaaaaccaatagaagaaagcattggggagatgctcccagacatgatctaggcaaaggcatttgtgtaagatctcaaaaacactggcaagagaagcaaaaacagaaaaatgggattacatcaggctaaaaagcttctgcacaacaaaggaaacaatcaacaaagtgaatagacatgccatagaatgggagaaaatacttgcaaactgtctatctgacaatgaattaataactgggatatataaatagcttaaacaactcaaaagcaaaaaacaaaaacaaaacatctgattaaaaatgggaaaatgatctgaataggcatttatattgcctattgcctattcagaagacatacaaatggccaacaggtatatgaaaaaatgttcatcatcactaaagagatgagaattgcaactcaaaaccataatgaaatattatgtcacccagataaaatggctttgataaaataaaaaagcaggaaataatggatgctggtgaagatgtggagaaaggggaactctatttacactgttggtgggaatgtaaatttgtacagccactatagaatattgtatgggggttcctcatgaaactaaaaattgaactactgtataatgtagcaattcactactgggtgtatatccaaaagaaaggaaaacaatatattgaaaagacacctgtactcccatgtttattgcagtgctgttcacagtagccaaaatatgaaatcaacctaagtgcccatcatgaatgaatggataaagaaaatgtggtacatatacacaatggactcttattcagccataaaaaagacttaactcctattatttacagcaacatggatggaactggaggtcattatgttaagtaaaataagtcaggcatagaaagacaaacattgcatgttctctttcatatgtgggagataaaaaagtgaacctcatgaaggtagagagtagattggtgattaccagaggcctgagagggtcatggggagagggagaggaagaatagattgattaatggatataaatttacagtttcaatgaagagataagacctagtatttgatagatcagtaaggtgatttatagtttacaatatcttttacatatttcacaataggtagaagggaataatttaaatgttgttagcataaagaaaagacaactatttaaggtgatggatatgccagttacattgatttgctctttacaaattatatgaatgtattaaattctcacatggaccctgaaatatgtacatctattatgtattgattaaaatatatttttttaaactccaggcttccccaagattgtaatccacctgtaatttaactgactgctagtaaagcctgttactttcagaggaaaacaattcaacctagagactttgcaaagtataatccacaatgttgtgtgtatgtgggctgtgtgtgtgtgtgaaggaatgagaaaatgtaacccaaacatttgagagagaaaaaaatgtgtgtagacatggtgacttttatcagaagttgtattaaggtatcttaaatttcagttcctattactttaaaatctaaaaaaaactataacagttatttcatgaacaaatctaccaaaaaaaattcattcaaatatttgcaatctgtttatgtttatgcatgagtgcccaaaagtatcttcagctctttttctccaatatttaacatttattcctgggattgaagaatgttccttctattttactcttaaacatcaaagcaatgaaactattaatcccgctaataatgatgcatatttctcaaagatgcctttcattttcagatcagcaaccaaaggagtttcaattgtctctccagttggctctaatgagagatgtacagatgttaaacccaatactcttcttaatcattttccttcgtgtacttgattaaatcctcaaaagcaaactgttcatgttcttgccgaaaatataggcggtctcacttaacagttatgttgcacaagaaagggaagttataatggcatggaacgtgctctacgtggtattttctagactttactagttcacgagcttttgtggataagtcaaactcttgaatgtcacttaaatgtaatcttttctgtagttgattatgcagagaatacaaaaggtatctgcagaatgtggaattaattttgaaagtttgataaaaacttcagaataatagctgtggctgtacaagtcatctatgaaactgttctctcataggtgacattaatttcctatctacagagttttattactgaatgtgttatgtttgtacccccacaaaactgaaataatagttttctttttttagcagtctatgaaaatgttgaggtttatcttgactgccgctttttaacataaatatttgggcttcattgaattcctaatatgtgatgtcacttggaattctgatagggtccagtaatttggcctgcaaagacatattttaccttaaaatgaaagggatagttgaaatgttattttacacgatagcaaaaaagcatccaacataagttgtgagatttttattgcttaacttttgaaatagaaggacaaggttcttatgtgcttgctttattccaaagtatatatgggaatgctaatgctttatatgtaaaatgtacgctacacatatttgtgattagttaatttttatggctagaaattctagaatcataaaaaagaactaatcttgaatgtcagagcttcacctatttttttaaaaacaatgagaacaaaaaaatcattataatttttatatttaccttgtgtttcacaaaaaggaggttttctttgctgtgctacactgcaagaatatgtcatgttcaaatctctggggctttattaaaaactttaactactgtcttcttatagagattattaagcaaatactaaagatagcatagatgtgtggtctaggcagtatttttctggcaagtagacctaagtgcagaatttaagttctgtaacattaacctgagactaaatcattttattcagggttgtctcctctgtgaacagctttatgttatgacctcatttgctacagcaaatgaaatattaatagatcattgaaaatgcagtaaagttttgatcagatgttataccttcattgtataccaaaccctgcctctcataaaaactttctacttgggtttaaattgaaattatcactcaattttttaaaatcaaacattttctttaagaacatgacaatgtaaacatatttcttacgggaatctttaagttctatatttttcaccaaaaatcatttcagaccatgctagttaaagagttattgaaaaaaaaaagaatctatttagatgagtcaaaaaattaagcaaagtatgttttaaataagttagtgactataaaatttctcaatttgggcatttattttgactgcaagtaacaaaacacctgacaaaagagacttaagtaaatagctctagatatatagttgactcttgaacaatgcaagggttaggactgctgatccccacccagtcgaaaatctgcatataacttttgactgtcccaaaatttaactactaatagcctactgttgaccagaagccttaatgataacataaaaaactgattaaaacatagtttgcatatatatttatactatattcttaccataagtaagctaaagaaaagaaaatctcattaagaaaatcataaggaagagaaaatatatttactattcattaagtggaagtggatcatcataaaagtattcatcctcattatcattatattgagtaagctaagtaggagaagaaagaggaaaggttggccttgctgtctcataagtggcagaggtggaagaaaatctacatgtaagtggatctgcacagttcaaatttattttgttcaagagtccgctgtggatagttgttggcattggtgaaccaatgccaaatataatggcggcatctttgtgattgttttggccttttcaaataactgaaagatgattgctgaagttgtagacatcatgtttagcggaaagaaagagaaaaggagaaggtggcagctctttcaagaaagctaaaatttcctaggaacctccataggagtcccatcatggtgttcccgtggcatctctgagcagttatgtttcatatcacaactcctaggtaaagtaaggcaaaggagaagcaggttagaagtaggcattaagttgccacatgttctaattgtcaccttgtttaccaagtcatgtatgtcttatctttgcttaccaaacaaaatgctctgattttcttgattagccatagtgacacttgcttcttgtctttgaaactgaaagtaataaaccacctcacgccatgtgttattcttccaaaagctaacataattttgattgatttgaaaatatatgatttcatatataaacatatataattatatatatatattagtatctattgctgccactttttacttaagactgatagcatcaatgttaaatagtgtcttttcagaagtattgattattctctctgttgcagatctcttcaaattgattgggtgtctccacggaagccaaatggcatcattcttggatatgatctcctatggaaaacatggtatccatgcgctaaaactcaaaagttagtgcaggatcagagtgatgagctctgcaaggcagtgaggtgtcaaaaacctgaatctatctgtggacacatttgctattcttctgaagctaaggtaagtcttttctaactaatcagtgaaccatgtttttctcactcaagactccaagtgaaattattagcttctcacaccatgatgtattatgatcaatatttccactactctatgaagaagactccacggaaaagaaaggatgcttacaaaaatcactatcaccctcatgagcactttagccttcccattttttattatcttcacaagaaatataaacttattagaatagggtacatcccaaattttatttgattgagtgacttaaaattttctttacaacagatcttttcagctacaaataggtgtttgtttatatggcactgatgagtaactgtgaggaggacattttatgatttgtcagaaatattttagcattatagtcatttgtagattaatgttcatattagatgcggtttagaaatcagatcaataatacagccagacagaggagtttgtaaatgacttttattgacaaacaacacaaaatccttagtttgaaggtagaattttatataatgaaataatgttcctatttggcaacaacagcatcacacattcaatggctaaagctactactaaatttataagatttactgcaaaagaacaccataattaagaaagtgagttactgaagcaatatggatcaaaatacaaattattatggctgacacaaatttagcaggagttatcatctaagaaatgcataaagccagcagttactaactgtgcattttttgatacttagactctaaaattatcattatgcctacatttgacatcattttatgccattaagtatgcacatatttaaatacacacatctgatgaacatatttgtataaaattaaatttgggatttctgagaagaaaaatactaaaataaatttgcccattaaacatatcctccacttaagaaaaacttgggaaaatgttggcaaaatacggaattcacttctcaatttttttctttgcttctattattttaatatttattatctgttacgaagtggacaaagagagaatagttgtataggcatacgaataaatgatttaaagtttgtggagtgcagaaaacaatgtgttccatcaaagtaaaaactgattctggccagaaactgtcatagtagtttaggtgtgtataatggatttgataagtttcaaccctataactttagtggcaaaatcaaagctaagtagagtaaaactagtaaagataatgtttccatttaagtttattctaaaagatcaaaaggtggatgttcttaaaatgttcatattaaattagaatatacctgagatagggtgaagaaaaagtaatgggatgaagaaaaatattaataaagtattaacagaataatatttacctatgtttaggctaaattatttataaaattactcctacctttctttatgctgtgatttcagaaaccgctttttgtaacttttaaaaatttactgaagctttgtaccaaataagtgactggttggtgtaacattcctaaattcagtgaatgacaaagaaccggttagtttaattttaaatcaatttaaaaatgatttagacaaatctactctacaaaaaaaaaaaaatcatacgggtcaccttttatagaaaataaatgtaaattgatgaatagggaagcaaaagttaggctttagaaaacaggcgtgtgcaaatctcaccacatagtcttgaaaagaaacatcacatttggttattcttataatgcaaatgtcataccttattacactaaaacgagacacactatttaatgatgccttaaacaaagtcttatttttattgttgagcttaaagaggcaacacaggtattgcggtaaaagagaataaaggatgtcagttaaatttcaaaaaaaaaattgtaaagttcagtttgggactaggtactaatacacatttcctagcatgaaagattggagagaagtagaaaagagacttgtattgcgggtttaaaagctttttggctaaatcactgtaaacatcaatgtttcccaaaatacttaaacaagctttaccataagattacagccatggttcacaaatcccagtgaacgtaagacctgggggaattgttaaaacctaggatttcatagctctagtcccagagattctgattcagtaggtttagatttggctgtgaaaatttgcatttctaaacatgttcccaggtgtcttagttcgttttcacagtgctataaagaattacctgagactgggtaatttatgaagaaaagaggtttgactcacagttctgcagacttaacaggaagcatgactgggaggcctcaggaaacttacaatcatggcggaaggtgaaggggaagcaaggaccttcttcatgtgatggcaggagggagagagagcgaaggggagagctgccacactcttttaaaccatcaaatctcgtgagaactcactcgcctttagacctacaataaaagtctctttcctacttctctccaatctttcatgctagaaaatatatattcatacctagccccaaatgaaatttacaattttttaaatttaattaacttcttctgttgtctttcactgcaatacctgtgttgcctctttaatcccaacaataagactttgtttaaggcattattaaaattttatataataaaaaatgtatatatttaaatatatctatttttattataaaattttatataataaaagatctatatcttatgtatatatacatatgtgtatgtgtaagatataagatatacatcttatatcttttattatataaaattaaaattttatataataaaataaaagatataaaattaaaattttatataattaaatacatattatattatatagtattataatagagcacaaagcatggttgaagacttcaaaaaagctgcattctatcaaataacatttataaaattcgaatgatcctggaaaatacatttttaaaccaacgaaatatgagtaatatggtctcagatcttctatgccttacaagaaaataattatattacatgagatacagtggtataacactcttaactaaactgatatttctttaaaactgttttcaaactttcaggtttgttgtaacggagtgctctataaccccaagcctggacatcgctgttgtgaagaaaagtatatcccgtttgttctgaattctactggagtttgttgtggtggccgaatacaggaggcacaaccaaatcatcagtgctgctctgggtattacgctagaattctaccaggtgagggttatttccaggtgtactcaaaaactatgggaacctgaaaacataaacacgtggttcatgtcagtgaactatttcaaacacctccctctcaacaaaaattgaaccataaacacatagccaatggcctgctctaaatattgtttcttccttctgctttgttaaaatataagcaaggctaaatattagaaaacgagagaacagaaggaatttacaatatctactacagaaagaaataaatctggagatctggctaactccttttatcttgtggctttttttattaacatgactatatattttcactattaaatatgtgaattgctgactgttccaccccatgaagctgttccccacttcctccatttctaatctgaactacacatgcattgttcttggatagatcgcaactgcaaatttcatttgtctgagaattctaggccactggcaatattctctcatcataagtcaggcaagggaaggaagaatgctgcaaagggtagcaaactggattttttccttcatccctttttagtattagccaacttagctagccattttgctccaaatttcaactacataaaacaatgcctagtgaatataattgggaatgatgctaataataactgccatttttaaagtaccaagtctctcgcaggctctgtattgaagactttacatgggataccttatagaatcttcacaactccaggaaatttgtattatacaaggcagtttacaagtaaggaaactgttttagagaggatcaataacatatccagattcacagatgtgcatagaagtgaaagaactaaaatgtgaatataagtatgtctctcctaaatctatgctcttttgtgtactttactgcctctttaaccaaaaagcatcaacctcttttgacaatttttttaaaaggactatttaagacttctaaacttcttcattactaccactgtcagttacaatttatcctgcaaaagtaattgagaatacaaaagtaattgagaatacaaacttttttctactacttaagtttgatactgatatcttctttaaagagcaggaaatggatataggagaaagacaagaaagccaagttttttggaggccataggaaagctgaatactttgagatatctagtttagggtgaaatttatgcccaacgtctggttcctgtaaattatgttcagtataactatatccatccaaggcatgtgaaatgagacactgtctaacccagtgtctgttttgcaaaatactggagcaaatatagaaggcgtgcaatcacctgatgggttcatcttgcccattgcacagatagagccaatttaccaaaacagtggtattgcaacagagaaagagcttaataaatgcagagccagctaagcagaacaggaggttttactcaaaacagtctcccagaaaattcaaaacctagggtctgtctgggcacggtggctcatgcctgtaatcccagcactttgggaggctgaggcgggtggatcacctgaagtcgggagatcaagaccagcctggccaacatggctaaaccccatctcttgtaaaaaatacaaaaaattaactgggcgtgtggcaggctcctgtaatcccagcttctcgggaggctgaagcaggagaattgcttgaatctgggaggcagaggttgcggtgagccgagatggtgccactgcactccaacctgggcaacagagtaagactctgtctcaaaaaaaaaaaaaaaaaaaaaccctaggggtttttttggttggttttttgtttgtttttgttttttgtttgtttttttatttgtttgtttgttttgagatggagttttgctcttgttgcccaggctggagtgcaatggcgtgatctccggctcactgcaacctccacctcccaggttcaagcgattctcctgcctcagcctcccaagtagctggaattacaggcatgtgccaccacacccggctaattttgtattttcagtagagacaggctttctccatgttggtcagggtggtctcgaactcccaacctcaaatgtctgcccaccttggcctcccaaagtgctgggattacaggtgtgagacaccacacctggcccagcctagggttttttttaggatagtgcagtaggcatagggctagggaatgaggaatgcttattggttggggataaaattatagggagtcagagctgtcttcttgtccttagtcagttcctggatggggactataggatcagatgagccagtttactggtctgggtgatactagctggtccctcagaataaagagtgtgaaaaatagctggtccctcagaataaagagtgtgaaaaatacgttgaacaccaatcttaggttttacaatagtgatgttatctatggaagcagttgggaaggttaggaatcatgtggcctctggtgccatgaacacctaagccgtagttccttgtggctaatttgttaattttataaaggtgctctgccccccaagcaaggagcaagtttgtttcaggaaaggactatcatcagtgtttcgaagttaaactaaacacctctcatagttatcttggcctatgcccaggaatggacagggtagcttgtaggctagaagcaagatggaattggttaggtcacatttctttcactgtcataattttccagtgtcaggattttcttactgtcataatttttgcaaaggtggtttcaggtgtcctgattaaatactgctcaagttttctcaaggcagagaaccttcactcattatttttccttataattaatagaaaaaaaaagtttgtatagcagtgctgttatttcttattctctatcaaaaatatttcaaaattgaataagttctagtaaaccagattttccacttaagaaaaagtaaaaatatatatggaaataaggattttgtagaaaactgttaaacttcttcatactacagctcacgatgtcaacaatggatcaaatactgttaaatgctttactttctcgaagtaacttaaatttggggagttttcatgtatgattcatatctgcccttgattacaaatcattgctataaaattataattacagtgatcagatggacgttttgtgttgttcaattcctaccattcttcacaccagtagaccaagttgatcatggaactaagtaatagtgttttcatttccacatcacattaaaatttttatgttatgatttgcaacaaactattcaaactctacaaaatatcctctgtcccttaaaactaatgaaaaattcttagttacatcttcactgctgctaactcaggagactggcctgtgactttctcaatgctaacataagtagtcagattttgaaccgacagcacaatctacttttgttaggtttcaaaataaaatttaacatttttcttaaaaatgaaataactcatggaagctcagaagttgtcattgatattatataagcctttaataattaatttttagaccaaggatttaaaaaatatgtattgtctgtatgtataaatacatgtttctgcacacctaaagcattttaatatctaccaaaccattgagcatgccccaaattttgattcttttttaaatagttcatttttcatagcattagaatgcataccctggtgtcaagaaaaaaggaaaaaagcaatctcatgaaataatcaaagagtgttttgctccaatcattaatcccactgtacctaaatgaagagattattttgtgacctctgtcctcagccccgtggtctttgttagctagtttaacactggttacactgagggggaaaaaagcgcaatggtcccaaatcctgttgcatctaaatgtgatttaaatctggtcactagtctgccagttcaaggccaagatgggtataggcattttgatatttatggattagcctgaaatattggtaaatacgtactttattttttttctcatgactttcttccataacaccccataacaaacagcagaagaggaaagaatgctcatttctctcccttttttaataaatatgctaataaccccaagtaaatgttaatgtgggtcattctttgataagaataacaattaactgttagactgcatggtagtttttagagagaaaacattttcaagcctggcctgaaatagattcattttgagaggttaatgagaaggtgactgatccttgtatcttatgtctaatagcccctttttgaggaaaaaaaaatagttttattttttattgatataatccacatctttttttttttgaagacttttcttctgtcagtaactaaataagattctgagggattcagaaagacatagctaaaatatctaaaccaattaacatttattatgctcaaaagaggctttaaaaaaaagtattggctttcgccatgtagatgtgtatactatgtttcctctaagctcaccattgtcctgagtggtgtttaattaactgttgttgccctgtaccatgggatacattatcttaaagtttaccatagagggacattatgttctttgactgtgaagacaaaaaatatggcaactacatttcagacgaaatagaattattttacccaggggaagataacaaatacagtaactttactgtttacaataagctcgttgctccttcattggtctctggtagcatcatcatggaaacttttactaagttccctttttcttagagataccatattataggatcctttcaaagataattgactaagccaactgtctcctgaattctagaaattcatattttgagaaaatcctgagtatgtcttgatccggtcctggatatttaccctagagaaaagcaaatttatgtttacacaaaaacctgtacatgagggtttacagcagctgtaatcattactgccaaaacctggaaacaattcaaatgtccctaagtgagtaaatggacaaatgtggaacaaaggaatactatgtagcaataaaaaagaacaaagtattgataagtgccaagaagatatcaagcccagtgaaagaagccagtctcaaaaagctaccaactgtgagactgcatttacatgacatactatacaagacaaaccatagttttggagaaaaaagttgacaattgccaagggtaatggatgggaagggaatgtgactatacagggatagcgtgagggtgttctgtgggggtgatgaaactcttttgtatcctgatggtgtttcttcattaaaattcatggaagtgtgcacccaaaaaaactaatggtcctgaataatatttttaaatgaaatatttttaaaacactatttccattttacacataggaaaaatgggacatagaaacatgaccaagacactcagctagtcaaaataggaattttcatggttaaattttaggttgagctcctagagatggtgtgttttataataatgtgatgactgtgtatgagtgacttaatatatttttctcatatgttagtagaacagtaagatagcaaatatatttccattaaaattacaatgaacatccctatctttaaaagaaagcaaaaatgtcttagtcagtgatgactatttcaagtaatattttacatgatcacattcttatgaaagcataagttttgtgtagtgtttccgtggtttgatgctgaataattagtgaataagatattggttctggagtcaaactgcctggctccatatcccatttctttcacctcttagttgtttgaccttcattaagtaactttaggaatattagcagggtattaatgtttctgatgtccattgggctgctgagttagaatactcaaagctaaccctatcttttatatctaaatagaaaaaaaatgtttagtaattgaggagcatatgagtaaagagggctaacaggcctcctttaaatgacaaagtttctaatgaatctttccagagcaaggactcaggggtgtccactttcatcagatcatgtaaagggatagccagttcccaaaagctaagattcaaacatctaatgacctttgagatcctatgaaacaaaggatccttgttgatcctatgaggccaagcaattctctaagttgacttttagcaactagccagggaaagtcatgaagagcttccaaactttgaagagaaaaagactttccattttgcaaaatgtcacagcctagaatttaggtcctagaaaaagcattttgttctgacaaaattgacatttagagactttatgtcgattgtatgctaccactattgacaaatagagggaatcaatttttcaagtctatctggagaacgtgacagatgatcattcacatattgcacaacagttgaatcttataggggaaattaaatatcgctcagtttgtttcctattgctgctataaatcatgaccagacacttcgtggcttaaaaccacacaaacttactttatacatccaaatatcaaaagtttgaaatgggtctcattgaactaaaactaagaagttaacaagagctgcattcccttctggaggagagaatccattttcttgccttttccaccttgcagaggctgctcacattctttggcttgtggaccccttccattttccaggccagcaatgaccagttgagcctttctcacttcatattattaaacttaatcacatctgttgtcttcattcccctttgccatgtaacataacatagtcacaggttccagggattaggatgtggacatcttagggaggccatgttgtgcttaccatggtaaggtaatggttaagcagttgtgagaattaagaaagcattgtcgtaaactcttggggaataactgtcacaagtgaaacaaaaaaagatactgtgagcctgagtgcaagaatatatgaaaaaaatgctaagtatagatttgctataaattaagcagctgcctcagggagtggcagtaggatgatattagggttgggaactacagggaaatgggggagtgcaatcttgttaatgacacttaaatcttgtacaaagtggtacacaagtcttttatcattttgatagagtgaacagtgaactacaaggactggtacaggggataatggggtgttatgccaagcgaggtaactttctagaggtatgtagatacaatggaccaagttattaaatattgttctttttagtagattttgggacagtttcaagaaatgcatagccagattgatagacatctttaaggggttagcatcctgtatgaatcccacatctgagcagtttttgccccagaggatcttggagacacattcaaagtcagagatgttgataacaaaggcatcaggtaattagctggtgctaccaccaaattataggccaggcattcttctcctgggagttacagaaagagactttcaggtgcacatttaatgctggtatctcatttacaaagtggatctcttctcaacagatgcactgaagtggaattactaaacaaaaaatatgttgattcaagagaaagaaaagaaaaataaaggcagaatctgaaaattatttgatatgtgtaccgctgagacatttggttattcctagaaagggataatggaaaattagaagggtttttgatagataatatacctaccaccagtatcaatcttctatttttacaattgcatagaaatttctcactttctatgtcaagggcagttatggatagatgagagcagctactttcacagagaggtgctgttttgtcagtttgtccttttttttttttttttttgattgtgtctttctaagatacactaataaaggcaaagtaggtgttctcccagtgtcccttacaatattgaaagttgtttttgtgcagactagacatagaggtgccctcattcttggctttatctaattgcttaatcccaaaagctgttaatgtggtctgaattttttttctttttttctgagccaaagtatcttctaagtgcttagcaagctcttgtaatttagaaggaagggacaatctactgtcttatcttctgttttatgggaagttatgataccttcttcactgatctttagagtattctggaaggtggtagttaagtgatctctgaagccaggcatggatttattttttccttgtttacaggacttttttgtggtaaagtatacaccacataaaatttatcattttaaccattttttaagcacacaattcagtggcattgagtgcatttgcattgttgtacaatcattaccaccatccatctctagagctcttttatcttctcaagctcagactctgtttccattaagcactaactttccactccctgttatcttcaacccctggaaaccaccattctgtttttggtctctatgaatttgactactctaggtacctaatataattggaatcatacaatatttgtctttttgtgtctggcttatttcacttagtgcattttctttcttttttttttattatactttaagttttagggtacatgtgcacaacgtgcaggttagttacatatatatacatgtgccatgttggtatgttgcacccattaactcgtcatttaacattaggtatatctcctaatcctatccctcccccatctccccaccccacaacaggcccctgtgtgtaatgttccccttcctgtgtccatgtgttctcattgttcaattcccacctatgagtgacaacatacggtgtttggttctttgtccttgcgatagtttgccgagaatgacggtttccagcttcatccatgtccctacaaagaacatgaactcatcattttttatggctgcatagtattccatggtgtatatgtgccacattttcttaatcctgtctatcattgttggacatttgggttggttccaagtctttgctattgtgaatagtgccgcaataaacatacgtgtgcatgtgtctttatagcagcatgatttacaatcctttgagtatgtacccagtaatgggatggctgggtcaaatggtatttctagttcaagatccctgaggaatcgccacactgacttccacaatggttgaactagtttacagtcccactaacagtgtgaaagtgttcctatttctccacatcctctccagcacctgttgtttcctgactttttaatgatcgccattctaactggtgtgagatagtatctcattgtggttttgacttgcatttctctgatgcccagtgatgatgagcattttttcatgtatcttttgtctgcataaatgtcttcttttgagaagtgtctgttcatatccttcacccactttttgatggggttgtttgttttttcttgtaaatttgtttgagttcattgtagattctggatattagccctttgtcagatgagtagattgcaaaagttttctcccattctgtaggttgcctgttcactctgatggtagttttttttgctgtgcagaagctcttgagtttaattagatcccatttgtcaattttggcttttgttgccattgcttttggtgttttagacatgaagtccttgcccatgcctatgtcctgaatggtattgcctaggttttcttctagggtttttatggttttaggtctaacatttaagtctttgatccatcttgaattgatttttgtataaggtgtaaggaagggatccagtttcagctttctacatatggctagccagttttcccagcaccatttattaaatagggaatccttttcccatttcttgtttttgtcaggtttgtcaaagatcagatagttgtagatatgtggcattatttctgagggctctgttctgttcctttggtttatatctctgttttggtaccagtaccatgctgttttggttactgtagccttgtagtctagtttgaagtcaggtagcgtgatgcctccagcttttttcttttggcttaggattgacttggcagtgtgggctcttttttgggtccatatgaattttaaagtagttttttccaattctgtgaagaaagtcattggtagcttgatggggatggcattgaatctgtaaattaccttgggcggtatggccattttcgtgatattgattcttcctacccatgagcatggaatgttcttccatttgtttgtatcctcttttatttcattgagcagtgctttgtagttctccttgaagaggtccttcacatcccttgtaagttggattcctaggtattttattctctttgaagcaattgtgaatgggagttcactcatgatttggctctctacttgtctgttattggtgtataagaatgcttgtgatttttgcacattgatgttgtatcctgaggctttgctgaagttgcctatcagcttaaggagattttgggctgagatgatggggttttctagatatacaatcatgtcatctgcaaacagggacaatttgacttcctcttttcctaattgaataccttttatttccttctcctgcctggttgccctggccagaacttccaaccctatgttgaataggagtggtgagagagggcatccctgtcttgtgcccgttttcaaagggaatgcttccagtttttgcccattcagtatgatattggttgtgggtttgtcatagatagctcttattattttgagatacatcccatcaatacctaatttattgagagtttttagcatgaagcgttgttgaattttgtcaaaggccttttctgcatctattgacataatcatgtggtttttgtcgctggttctgtttatatgctggattatgtttattgatttgtgtatgttcccattcatgttgtcgtacgtgtcaggattttattcctttttaaggtcgaataatgtctcattgtatgtatataacacttttgtattcatttattcatcagcggacattggggttatttctgcctagtgactattatggttaaagctgccataaacattgatgtagaaatgtacaaatttctgttcaatctcctgttttcaattcttttgggtttatacccagaagtggaattgctggatcatatggtaattctatgtttaattttcatgttaagaactgccatactgttttgtggaacattttaacattttatattcccaacaacgcataagtgtgccaatttctccatattcttactgtttattattttatgttttttataactatcctaatgagtatcaagtggtatctcattgtggttttgatttgcatttccctacttattactaatattgagtatattttcatgtgtttattggctatttgtatgtcttctttggaaaaaagtgtctattaaagttatttgcccatttaaaaaataaggtctttgtttcatgtttttgagttatagaagttctttatacattctggatactacttccttatcagatatataattttaatatattttctcatgagttgccttttcactttgttgacagtgttctttgatgccaaaaagttattaatattaattatgatgaatccaattcatcttttttccttattgcttctgctttcagtgtcatagccaagaaatcattggcagacccaatgtcatgaaatttcccctttgctttcgtctaagaattgtaagttttagcttttacatctagatctttgatccattttgagttagttttggtatatggtataaagtaagggttcaatatcattctttggcatgtggatattcaacttttccaacattctttaaaaaaaaaaaaaggtcctttcctcattaaatggtcttggcacttttgttgaaaatcatttgcccatatatgcaagggttcatttttaggatctctgttctatcccattggtctatgtgtctgtctttgtaccagtaacacacttttgattactgtaactttgtagtaagttttgaaatcagaaagtgggagatctccaactttgttctttttcaatgttgttttgactatttgcagttttttgagattccatgtgaattttataatggcttcttctgcttctgcaaaaagcattgggattttgatagggattgaattgattctgtagatcacttgagcagtactggcaccttaacaacattaaggctcccagtccataaacatgggatgttcttccatttggttatcttctttaatttctttcaacaacattttgtagtatttcagtctttcgctttcttggtaagctcattcttaagtctttctttttttgatgttattgtaaatgaaattatcttattaattttattttcatgttgttcattcttagtgtatagaaacatacctagtttttctatgctgactttgtatcttgatactgtgctgaattgtttattagttgtaacaggttttttttttttttagaatctttatagttttctctatatgatatcatgttgtctgagaacacatagttttgcttcttccctttcaatttagatgccttttatttttttctcttgcctattgctctagccataatatccaatattatgtagaatacaagtggcaaagggtggcaaccttttcttgtttctgattttagaggaaaagttttccgtctttcactgttgagtatgacattaggtataggtttttctcatatactcttgattatgttgaagtagttttcatctattcctattttcttgagtggatttataatgaaagagattgaattttgtcaaatatttgttctacatcaactgagataatcatgtgtttcttttttttcccctttgttctattgatataatgtgttacattgattaaattttcatatattgacccatcctggtattccagggatatatcccgcttggtcatgttgcagaatcattttgatgtgcttttgaattcagtttgctagtattttgttgaagatttttgcatcaatattcatgagagctattgattttaacttttttcttgtggtttctttggtaagttgtatgtttctagtaatttgctcatttcatctagtgagatggatttttggccaataaatttggaaagaaaagatctcaaggatagctgctgagagttattgtcttattatttatactccttatatatctatgtttaattaaatattgtcccatatttttatatcattttggtaaacagtacatcttgcttttactaaacaaattttaggatatccagggctcaccaaaaggtgaactaattgagaagaagtccaggactataaatccctaaggcagtcctaaattcttcagtggatttgtgccatttcttaagaaagcttgacaagtcattaattggattatagaaatcttacctggaccatggttgaaggccataagacccatcagattggtcatcatactcacataccttataagatataatgaagagatgttgtccaggggaaaagatatgttcaagaaagaacggtagagaaaagggaagaaggtctgttgaaggtgtaggaagaagaggaggagcaggacaaaagagagaaggaagtcagggttccgaaggccacgagggaagacaaccacagtggggtcatgagatagagaagagaaatgaagcttggatttcagatccaccaagtttttattagttcttttgaaggtatccttaagggaagccatttacaaaatcttctgtcctttagagttgtctttataccaaacaaacaaacaagctaactcttggtatttagagtatttgagtcctttgattttaaggtaccaggcaaaagattatctaattctgttttttgttttttttgtttgtttgtttttgttttttagatatgcccaggctggagtgcagtgaaacaatcctggctcactgcgcactctgcctcccgcctcccgggttcaagcaattctcgtgcctcagcctctcgagtaggtgggactacaggcatgcaccaccaagcctggataatttttttatttttagtagagatggggtttcaccatgttggccaggctggtcttgaactcctggcctcaagttatccacccacctaggcctcccaaagtgttgggattacaggtgtaaagcaccacacctggtggattatcttattcttatcccaaatttcccagactgtcatgtgaagagaaatgtagtaaaattcagtgtgtgacatagcccagagaagtactagcacactgacttaaatacagtattttttacctcctctcatgtaattaaccttcccaatgggagtattttgtttggttgaacaaatatagtttggtcaaggaaattatagtcataagcaatataaatttatcaatagttggtttttgaatccactctacgttccaaaagaaaattacacagaacaaaaaagtattcctagatgtttttctataatgccacatagtccatgtcaccagacctgatggtgaggaaatagacaacatagacttacctgtaagttgccatgtgtgtatctgatctgacacacgtttatacacaaaaactttggagtcatttggaaattttgcaactccaatatgatattattctctttagtaattctgtcaatcagttgggatctgcaagatgattgtgataaaagttaattgttagtcatagcatatttttttaactgatgtaatgattattattgtcctaaattgacaggtgaagtatgctgtccagatgaacagcacaatcgggtttctgttggcattggtgattcctgctgtggcagaatgccgtactccacctcaggaaaccagatttgctgtgctgggaggcttcatgatggccatggccagaagtgctgtggcagacagattgtgagcaacgatttagagtgttgtggtggagaagaaggagtggtgtacaatcgccttccaggtaaggggcccaggtctacctttcagtagatggaggatctgagaagcagagagagtgagaaatttgccctagaaataaaacaaataagtaattaaagctcacattggttatatctaatgcaataattaggaacatattgtttaacacataacaatgtaatctcccaatttttacatgtatctcatgtatttcataaaaacgcatcaattttttttcctcttgaaaaggtcatgtcctccaaaaaaaattccacacatgaatgcattggttatgaatgaaaagaatatttcctagcaaatagtatacaaaattattataatgatattttgttataattcttttactcccttattctactgtattaagctaacactaatataaataacaataagtatcattgaatgaatactaacagacactgtgccaatattttatatattattacctcaaataatcttcacaataatcttacatgataggtactatcaattatctgcattttaaaaatgaagaaactgaagttcagacattagatattagacattatcttgctaaataccacacagtcagatccagattttgggaagcctgacatttatgttattggaggtggggcttttaaagacaagaaaattaaaatatgaagttaatgttcacagtatcttcaccaggcatagattccatctcaagaagccactttctttgctcctccctaagaagcaactcctcatctgttagttttatgattgcagcaattcagttacctcttcaggcttcacttctcattccagttctcttgctatttccactgcatctgcagttatttttcccattttgagtctaaaaccccttagtcatccatgagggttggaatcaacttcctctaaactcctgttaatgttgatattttgacttcttcccatgaatcatgaatattcttaattgcatctagaatggtgaatcctttccaggttttcaatttactttgtccagatccatcagaggaattactatctatggcagctatagccttacaaaatgtatttttaaataataaaactggaaagtcaaaatgactacttgacctatgctgtgttaataggcatgtaaacattaattttcttgtctatttccatcagagctcttgagtgaccagatgaattgtcagtgagtattaatattttaaaagaaatatcttttttctgagcagtaggtctcaataatgagcttaaaatacatagtaaaccatattgtaaacagatatgtaatcatacagcctttttgttccatttacaagcacaagcagaatagatttagcataattattaagggccctagagtttttgcagtggtcaatgagcatgggcttccacttaaagtcaccagctgctttagccccccagcaggagagtcaacctgtcctttgaaactttgaaaccaggcgttgactttttccctctacctatgaaagctctagttggcatcttcttccagtacaaggctatttcatctacaatgaagatctgttgtttagtgtagccaccttcatcagtgatcttacctaggtgttctgggtaacttgaggcagcagtttctacatcagcacttgctgcttcaccttgcacttttatgttatgaagatggctttttttcttaaacctcatgaaccaacttctgttagctttcatctattcttctgcagcttcctcatctctctcagccttcatagaattaaagagagtaagagccttgcctggactaggctttggcctaagggactattgtgactgatttgatcttctatccagaccactcaaagtgtcttcatatcagcaataaggctgtttcacttattcataagtgaatgataagtgaaatagaaatcttacctggaccacggttgaaggccataagacccacaagatttgtcatcattctcacataccttataagatataataaagagatactgtccaggggaaaagatatgttcaagaaggaatggtacagaaaagagaagaaggtctgttgaaggtgtgggaggaagaggagcattttgattttcttcaagaactgttcctttgcatgcataactgggctaactgttgggcatgagaggtctagtttttggcctgtcttggctttccacatgccttcctcaataagcttaatcattcctagcttttgatttaaagtgagagacatgagactcttcctttcacttgaacacttagaggctattgtaaggtaattaattggcctaattttaatattgctgtgcctcagagaataggaaggcctgaggagagggagaaagataaaggaacggctggtctgtgaaacagtcagaacacacaggacgctcatcaactaagctttccgtcttatatgggcaaggttcatgacacgctaaaacaattaccatagtaacatcaaaggtcattgaccacaaatataaatataaaatataaaaattaaaaatataaaaatataacaaatataataataatgaaaaagtttaaaatattgtgagaatcatcaaaatgtgacagagacacgaagcgaacacgtgctattggaaaattggcaccaatagacttcttgatgcagggtggccacaaaacttcaatttgtaaaaaaatgcagtctctgcaaagtgcagtaaatcaaagcacaataacgtgaagtaagcctgtgatactaaactactatatgcctttttaactcttattctctcctatgtgtacagcagagcttttcagatgttacatggcatgatttgcaacagatcgaatgcagactcagaaagaaaattaaattgacttctcttaactaaacatttaaaaagcttgcaaaaatataacacaatgtcattcttctattttttatttgaaaaacatttattttcataaatatgttagaatgttatagatttattattttatgtctaaatgcattaataaatatttcaaaaatttctgccgtaagttttaacacagtacatatcaacaggtaaaacccatataaacaaaaggtatttggggtcctcaataattcgtaagcgtataaaaggatcctgagaccataatttgagaaccactgcttaaagtcatagtaacgtctactagaaaattatggcaactaattagttatcctgtactatgactaaccagttgaatacctcctcctcctttagatgaagtagctaataacaggtctattaaagatagaaccaaggtggcagggagggtgcaaaagtgttacctcctgtgtactctaatacatcagagtttaaaaatgacagcaaaatatttgattttagtgtgtttgttcatctgtagctttttaaaagaattagtcaactgctatactccgtcctttgttaaatatgtattatgtagtaaccatattcaagacatcattcttggtgctttgcaagtgtaaaaatggccaagattccgtttttatcctcaagaacttacaacctaatcaaggagaaaagtgcctacaaggttatacacagaccataagagagggatgaatgcatgcatattcttaagacggagagatcactccagtcaaggtaatgaagggggttgttccattggattggaatctcaaacagtgagtatgattttggcaggtgtggcttgagctaaactgtgaaattagcaatctgcaaaacacaaataatagcgtgtgctttggtttacaggaggtatacactctgtgtaaggaagaaaggagataaatctgagtaggcaaaaggatttgaacattatttagcactcagggaagagtcaatatgatgataagaactgtagtttaagattaaatttaggtgtcagaacaaatacaatagagaaggaaagagaagtcagaacacccctggcatgaagtaaaatacatctgttctaagaagtggaatggaggttaccgtccactaggacaatggttcttaacttgttttccttttgaatcttttggaagttacaaaccctcactctgaataatagtgcatggaatatacacaaaaatttgcctgtaattttatccacccttgaactccatccatgaactcaaatttcagaatcacttctttatttactccaagatgatgtcgcatgccagtcaaacatttcttacacaaatggtgacagccctcaactcttgcgaatcaagataagctctagagtttctcatggcattctacagctctgccaactctgataatcatagtggacttaaggaataatagttttacaaaggaaaaaatatatctttttattctcttgactttctttctgcaggttgcactgaaaatagacagattccacatgtatttttcctctctctgctgccgttcactcctgtagcccctaatgactgtgaccttaatgaccttccagaatatccatatggccctttttctcctcaacctagcaacaaacagcatacctgctacataagtgtttggatctcataatatcgttcctaagcctggcctctctcgctgcctggcattgtgtgcctgccacgagaccgggctggctcgtaaaacatctctttatgtactttattacttaaactcttttatttgcctgcaggagccctttaacaaaatcacattgaattgactttctcacaccaaatcaaatctccctggtcccagttcagttgtctttgtcaatatgtattttataaatggagtgaattaacagatgctgttggaacagaagtgctggggtggcgtttatgtttttagtgctctctctgggcagatgcgttgtgtagaagtgttatacaggtatctcgggatgaaagtcatgcgtgtcatttcagtggatatgtattcttagccattttctttgaatagattttaaacctatttattactcatttttttcttagtgtttgcttatatagctttatcatttatgccattaatcttggattggacttgattatatcccttagtatgaaaaggtgaaaaattaaaacctccgtttcattcaaagaggacagatttttctattagccatgggaaactgatcatgagatgactttggaatatattgacttatttatattataaactttgtccatgcggcctttgatgtgaaactctgagttgaaattgtttcagaatacaagactgagttttcatgtcctggactctgacttcagtagaacaaatgactatcgctgtttgtttcataagatgggaatttgggaattttgcagagggaagtataattacagaagtccatggtgtaagggtggcattgaaaaaacatttccctggaagatttccataaaacagaatgattttttttttgaaaagtgtaatatatcagtgctataaaatgtatcacaatgatttggggagcatttttactctaccctctgttttgtggtggtagtcacagagccatctactggtgaagacaagtgtgaatttcttttctttcatgctctgccacaaatgttatacatttgtcctaaggatgactaatcacaaaccttttttttcttctaggcctaaaatatcccttggcttaaaatttggtccccatgaacaatctcagagtttcacaatgatttgtcatattccagactggattttactactatactatttttatctcaaaggcatgatacataattcttggtcttctttaaaaaaaagtggaatcccagttttgcagtcttaactatttagaaattcatccaacagatatgcttataaatgcttttctttttagacatagatatgaaataagcattggtaacatatttgaagtattaataatattgtgagtaaaaattttttcctccactattttctcagttgtgtccaatcaatggaaaccattggatatatatacagtttagaaagacaatatatgctttttcatctgaaaaataaacacctactagtttaatgtgtactgtaccactttactaacatctgcattttgttcaaagacacactccaccttttgtacaaatttaatgaagaggctctggaagaatggaccaatccatcaataatgcatgacctattttgtttttctttgggcatatttaaaatcgtgcattccgtgtgtcaaagttcaaaagtcaagtgctacatgtgataaattaggtaggggtcgaaagttattgcaatgcagtttcggaagattgtctgtctctgaatttgcagctcattcatgctgaagtgatgcactatgggaattactaccaaactctgctccgcaacatctgctctccctaagtgagttagtgcacgtcagacatctttatgtcagaatattgcagtgatggatgcagtcttcagaaaatgctgcataaaaatctggtgtgccgttctggccattaagtgaaattactatttaaattaatggcactgtcacagtttatctgtgcaaagaatgaacgctgattagggtattaagtaattagcaatttatcacactggaacaaggttgataataattaaagaagtaatggtttaccaaagaatctaaaaagggagtcacttcttgttatgtgagtgaaatcttggctgaaaatttcaattcagtaatacaaagatgaagctctttgtgaaagaaggcatcttttttttctagtttaaaaacagttcattatcaaaattttagttgacctgtcagaagtccctcagagtgatcagatgactgattaggagtttcaaattaggtcaatgtctgcatttttattttatacttaaagcatagtgaaaccatgaagtaatttgggaatgagagggggagaatatattccgctccctaaagggccagttttcaaattttgattgctctttaaaagagaaacatgaattgtcttcagaaaactgccagagaaaaaattaacagtaaaaaaatccatggttgtatttaaatgtctaatcagaaggggcagaaaaatgcccgaacaatataaaacttgaagctacggatttttctttttagtttatgtgtgtgtgtacactcatgtatgtatatatttatatgtatttgtgtgtgtatatatacacatacatatgcatacatacatagctacacacacataaatatgtgtatttgggtatgtacttatacatacacacatatatacccaccataatccagactcagactaaaatgagccctgctctttgtattaatttgagataacttttcctagaaatgttaaaaccactaaaattataaatatagcagttaatttgtaaaccaattacttcgaagagttatcacattagataaacatggtatgccaaagctctgttagaatcagtgtatatcattaatcataaataagagtttttaatattagagacttttgtaagtaaaaagatgaatgagagggttctttggagtcatgtgtggataaacatctttcttaaggcatgtgccaaaccaatgtctactttcaatgattttttttaaaagcacttttgatcttttatttgagtgtctttaataatgtagatgtttacacaggaccagattaaacaattcaggaccccagggcactttgaatttgaggttctttatgttatcagtcggaactaataataaacaaacaaaattccaattaaaataaatcattcatcacattgtgctgctatataactggatataaattctaatataaaaacactgtgacatgcagtatagccaccttgatttctagcttgatctgtctctagagtagtgttaatttattcctgctttaatgttaaaatttctgccatttctctttgatggcaatatctaaatgatgcaaatgcaggtaattaaactaaatttggtgggagaaaatgtctatttggtatctcaggtacgtgtgtctttcgtttagatgtggggatcagtgatcctctctacaaggtctttctgcggctgcccccagcctgtcacctgtgtctgtgatgggtctagaacagagtgaggctcaaaaaatagtggctgattagtgcacctgatcagtgaacatgctcagctgattatgaataaataccaaatccatctcatgcagaaaacatggttaccattgcagctaaattcacaagaaacaaatatttgtaccctaaataaagctaagccaaaacttgcactgcttctcccgcagggcttccagttctaggatggtgctacctttccactctgcctgggcttttatcccagagtacttgggtgaccttttctcccttatgaatttctagagctttctcagagtccctatagtttaactaaccttcttctgcaacaagatgttatcatcacaaaatgcgcaggcagttttcatgacagaaatcctatctctttttatggagcatgagagaagtttggcccagctgaatgattttcgaacatttcctcttgtgtgttcttttcctaattagtgtctagtgctcttggtaagaaggaccctcactgcacatttaaatcaccttggtagggaaatgctaccttaggtattgcaccatttcagcaactgcctgagcctgacatttttataccaaactttatagcagcctcagttttcttccctttttctatttcatattcatatataacattttattgttgcaggtatgttctgttgtgggcaggattatgtgaatatgtcagataccatatgctgctcagcttccagtggagagtctaaagcacatattaaaaagaatgacccggtgccagtaaaatgctgtgagactgaacttattccaaagagccagaaatgctgtaatggagttggatataatcctttgaaatatgtttgctctgacaagatttcaactggaatgatgatgaaggtaattgatagaaaagctctcggaggcgctgatttgacaatggaaagagaaatacattgttcataactatttttctaaaataggaatataaaaactcctgtgtgcattattcattttcacattacatccatattaataccgaatgagttcgctatgattgatgttattgcaatgaattctaaaggaattaataatgattagctgttctcagggaagctttacccagcacttcagattagtgcaggactgaaagtctgtgtgccactgaaagagccagcacaggtcgtctggggcctctgcatggtgccatttcatgcctgggagcactgtggatggaggcaggaggaaattcccgcttcttctccctagcccgccagccatcatccaccactttcctttgatagagaccttagatccagcaaattcgcttagttgcatttatatcatattcccttggacaatgcaagatgagcaaatgcctgtgtcaaaagtgaatgaataggcttctgggtgtaatcgcttatgtttttgtatggtgatggtttgtacacagccatgtcatgtatgtgggtattaaacttgacccaggataccagaagcctatcaatttaaggaaaggaccatggacactttaaaaataaacatgctaccgtgttctgtagtaatttgtcattataagaccactaaaaatgggtgtcttggtcacagacaatggaaggacgcttgttcaatgaggcaactacacagtccttgtgtagaccacatacactttgtacactttgggatgtaaaataactcatgagattgttagaagccctgcaagcactttgtatcaatgaatgattaagataacacataaggttggttaaattattctaatgaggacaatatttctccatgctgaatcaagtagtgtgtatacataataatgttcagtctgtaggtttcattttgttttctgaagacctaccacctggagacatttatatcctgttccagtctggaatggatcaccatgggatttttacatagctggcccattcggtcttccctaagctatcaattcaggaattccttttacctctttcctgtgttgattcccctgtttttttgttttgttttgttttgttttgttttgttttggattccaagtttcattccatttggagaattatcttcttgtatatagatgtatggagggtaaattttttaaaagcttaatgtataaaaatactattattttaccctccaacaggattgatagtttggtctgatatacaattccaggttaaaaattatgtctactcagaattttgaggcatttctgcatgttttaagcttccattaatattttgattcctatctctctgttggtaaccatgtttcttttcctatgaaagctcttgaagatgttctctttatcctgctcctctaaaatttcatgacaatgaacctctatgtggaagttaggatggtttctttttgcattttgttttccatttttgtgatgagagcatttaggatctactctcttagcaattttttttttacattacaattcattatgagttaggcagttgtcttccaagtaacatctctagaaccgaagccccttacatcttgtgatgcttcatgcagcccttggatcataatggaaaaggcgcaagaggggacaattgcacacagacagttcctacctggatatagagtacatcctttctatgcactagtcacacagacatatctagtcaggtggcttctcctactgcagccaggtttcaacatcccatgttcccagagagaaaagggaaacatggacatcactgagcacattgcattgtctctgccacattcatctactttccagcttccaaaaaggtatgcactgtcttgtgtgtattatttttctccattttttcttagactttcaacacgtaaaccagtattttactgtcatttagttgggcttttagaggatagatagatagatatagatagatagatacacacacatacacacacacacatatatatatagtgggattctatttatgtagtgtcatcttggctcactgcaacctctacctgctaggttcaagcgattctcctccctcaacctgccaagtagctgggattacaggtgtgcgccaccaagcccagctaatttttgtttttttagtagtgacagggtttcgccatgttgatcggtctggtctcgaaatcctgacctcaagtgatccacccacctccgcctcccaaagtgttgggattatagacatgagccactgcgcccagacccactatatatttttgaatgtactattttgatcaacttggtaagaataattcaacttattttatgtaagagagaggctgaatggagatcaattttaatagcaaaaagtattctaaatacattatgctacttatgtaaaggaaaggcaaagtagatctccacattataaaactattaccttacttatagctcttgtagtgtgggatgattaagtatttaatttccttggattaaaacaaagtggtacttatcaaaaaccataaaaaatctggagatgtgtcagagaaaatgtttataagcgtaaataattataattacaatgacagttcatgaaacatttatatttttaaaaacttggatcagtaatacttctaatgggaccaacttccccaacaacacaggaagtgtaaattctcaaatatcacattctttattttctctaaaattccataggaaagtatcaaatagcaaaaataaaatatttgtagtgtgtatactaagtttaaagacttatcagttttgagtcacacaacaaaccttggtggtaaattatatgatttgagtcacacaacaaaccttggtagtaaattttgtctccatgttccccactgaagaagctgaggttttgaaaacataagtgacttgctcaaggttacagagctgggaagctgcaaaactgaaattttaatcccaatttgtgacatttcaaagtcattgttcttcctagtatacaaactgccttcatttctttttataaattttgaaatattcattcatcaagtaagtggaggaaaaatttcatttgaaagtcacaaaagcctaccctatgtatgtctaaatgaaatttttaaatacccctctctctctcacccctgccacttgactcaggaaaccaaagagtgcaggatcctctgcccagcatctatggaagccacagaacattgtggcaggtgtgacttcaactttaccagccacatttgcactgtgataagagggtctcacaattccacagggaaggcatcaattgaagaaatgtgttcatctgccgaagaaaccattcatacagggagtgtaaacacgtactcttacacaggtaacagaaagcaagctgtctgcccatggcttaatggggttagtgagaagctgctgaaaatgcagatttatttcactctgacatcaactctccttaaactgatatcagtacattccatcatactttgaggccagctagttacaaggtaattaaaggcataatctggatgtattcaaagtcagtactttaaaatgtgttaaagtctatttaaacaaggttgtattccatattaaggtaaatctgtggagatatctgtgacctttactgctatatccagttaatttacaataaatccaatttcctttttcaaaagctgcaatgcagcttccactgaatgcattgaatgaatactgctatactcttaagcagaaagaaggatgaacctgtctgattaataataaaacctaacagtgctactctgaggatgaggtaaacccaagcatgacatttctccaagatggctggtcatctccaaaagaataacctttgcagttattgtaaatattaatttctatgtaccatcttggccctgctgaattagtccaaaatggttatgcttagttttggctgagctgtgtgagaaacactgttaagtttagaattatctctaaaacagttctgccatcaattaaatttgtgttattcatccatttacttaagtccctacaaaatgtgttcttgttttttgaaaaatcaagtttgtgtgtgtgtgtgtgtgtgtgtgtgtgtgtgtgtgtatcatctatcatcttgattcaatagaatccatttaagtgacataatttgagcaagctaaggttaataaacaagcaaaacattgctccattccatcatgaatcatcagtctgctttactcaaccaaggggcaataatggctaacctcaagagtgcagaaagtaaggcaggctactaagataagaggaggaagattaggaagggaagaaaggaacagagataaggttgattgaacattatttagtctcaatgttatactaggtactttaatttttttattatactttaagttctagggtacatgtgcacaacgtgcaggtttgttacatgtatacatgtgccatgttggtgtgctgcacccattaacttgtcatttacattaggtatatctctacactaggtactttaaaaccttatctcagttaccaacaaagcaatcatataaatatggtcatttaacagatgaggaaactgagggtcagatctgtaaaagttactcgccatgagaaagaaacatattcaaataatgccatcatcaaaagggacagactttgaagactccacgtggtgcaggagctcctttcagagtgctccaaatgcacttcaagctgttattccacctgaaatgtcctcctttatcatcctactcaaggcctaggtcaagattcttttcctcaatgcagtccctgtgctgctatggcacattgttcacaaagctcactagctctctcatgtgtcatatggatttggacacttgttccagctcttctattagattgaaacatccttatgaatagggcatttttgtttacctttgcctcgttatttggatttagaacactatacaaacaaaaaatatttcttggaatgaatttaattaggaaaggcctcagatagaggacaatttgtccaaccttctattgtgttcccagtcccagttatagatttaagtcatggactttcatttttaaattattgagtttccatctaagagagttctctacttttatctgccccttgtaatcaagatcaagattttgaagggcttttaataaatacttgtaatagccctctccagaagtgaatagatgtttccacctactgatataatgttatgagggcttttaaaatccatatttcagattgctttgcctgcagaaaatactacaaattgaatatgaaaaataacaaactgttctttttcatgaaagatgttcagcacacaagtggtgctatgataattccattgagaacaatttagattaagtcagactcttttagaaacttacacttgaaagctgacaataccagtgctgacaaaaatttattcatttatgcaatcatttatttatcaaaaattatttattaaatacctactaataactagtcactacattaggactagcagctatgatgacaaacaataatttttcattgagatttcaaccctatatgaagaaagaaggaagcagcaaatgagatttgaaatggtaatgtgggcttgaggatacagaataacagtcattaccaataagtagtttaatttgctgtagcagaaatgtaaaacatattgaccatctgagggtaggtagatggtctaggcaactgaatcgcacaaggtcattcaggtatccagaatccagaatggcaaccgaaggtatgcaattttctctttataaaatgatgtggaagttgtcagtgtctttctatactccttcaagtattgagatctgagtcatgtgaccactagaagctacaaagaaaactggcaaatgtggttttctaagcaggaggcctctgaccaggatggaagggagaactggggactcatggttgccatcacaggcaacaagtggcagatacccccgagcagaaaaaaatggaaaaggaagataatgctttacatttgtagagcaatctgcattttatgaagttctgccccataatttattgcattgtattttcatattagttctatacagtgggcagggaagggtttattgtaaggagatgtatataaggagaatgtctctccattaatctaagcatagagactgagaattaactccacgtccaatggagatgagcaggtggccaggcagccaaggaggaaggcctccttttctgatgctcaatctgagaaagagtcatccagaagctaacacacaaaaatacatacatacttacttaaaattcatcaaattagagacatggaaaataaatttaaataattaaactttcaagtaagtttttcaggggaaatgtgtagcattggtatttccgaagttattaaagcctaaatggaactaagactttggggacacaactgaatcacatgagtgttcatctaatacaatttttgccagtttggaaagctcagcaggcttggttttattgttttaataaagttggttggtttgtattttggttttcagttctggcttttgtggaagagggaaggaactagatagcagagtatgctttcatttttattcactaacatggtaccatgataaactaagtttcaaatcctgtatattgtaacaacattataatccatatgatttaaaattttttaagtaatattaacaaagtaacagaaagcaataatttataagttctatgatactaaaactataaaagaatgttgccaaacctgtctcatgtaggaatcaaaactacatgaatttgtgaagcactaaatcttattatacatgattccagtgcttttatttttcatttatttaatatatccctctttctctgctcagaaacagggaattctattctgtgcaattccgtatccctgcatctaataaatactttaaatgttacttatatttagaaaataaagatattagagttttatttatatacaaagcgtttagagcattaaacatttatttttaaatgtctaaagtttttgatattcacttttaatatgatggttaaaaaatgaaaataagagaaacttccctgtctattttttctctttccagatgtgaacctcaagccctacatgacatatgagtacaggatttctgcctggaacagctatgggcgaggactcagcaaagctgtgagagccagaacaaaagaagatgtgcctcaaggagtgagtccccctacgtggaccaaaatagacaatcttgaagatacaattgtcttaaactggagaaaacctatacaatcaaatggtattgagatacctttaaaatacaaataacaaaatcccataaattcataagaaaattgaaatgagtacaatctacatttaattgccctatgcatctaaccactagaaaagtatgttccgataaagggaactgtaattatgtgacaactaatcactcactttgtggtgtagtcctcgtagatttttagcctaaataagtaaaaaaatagaaatgaaagttccttgaatcccagaatatatctgagctgctttcaaaacaagcaaggcatattcagagaaggggaaagagttttaatattgaaagtaaatttgtttcatagtgaaaggaaataaacataaatgactcttatcatttatgtcaagaatccatctcctccataatagtataattaggaactgcttgagacagcaatataataggaaattaaaattaaataaagctatagtattgcatttcttccgaacactaagatttgtaagttgtttgcaaatagttaaaatgatatcacattcaaatgcagtcatttttctgcttcttttaggtcctattatttactacatccttcttcgaaatggaattgaacgttttcggggaacatcactgagcttctctgataaagagggaattcaaccatttcaggaatattcatatcagctgaaagcttgcacggttgctggctgtgccaccagtagcaaggtaagaggagtttgcctaaactctgggaaaaggggttcagtgtgaagattatctgaacatccaggttgtgactgcttttttcattgaagaaaacaatgtccctcctcaaagtggtgttaagtagcgtgttcatgtgtcacgttaactgagtgctaatacctatggctggaaggagagatcatttcaagggagatttatccaaatatcaatcttgtgttaatgaaaaacaagtgaaatcttgaagcagtaccatcttttcttccacattctttcctcaccaaccaattttaggtaatctataaatctataaaaatgtccaaatcattattcagttaaagaaagtttctatttaaatatgatatgaacaaaaattgtctgattttaaaaaatgaagagaagggcaaaaaagcctggcacggaaaacaaaattgttccaagccttctgctatagccttgtcaagaaataatgaagacctgaatttaggcagcagaggtcagaaccgagaatacagaatgatacaacagacatgggggataaaatctacaaaacttggtactcaattatatttacagaaataaaaggaaagagtcacggatattgtcaaatatctgcttgagtaatttgtggatcatggtgctattctgcaagcaaatttttaaaaaagagaaaaatgttgaaggtaaaagaataggattctgttttgttaagttttgtaaaaaatatatttaaagagaaggatcagatagcagggtggcggaagcagatagtacttggcactttatgtgaaaatatctggtcagaaaccagattgagaggtgactgaagtttctagaaagatctgtatgggaagttgaagtaatgagtataaatatggacatggaaggagaatagagagaaacaaatatggaatattgtggatgatgagcactggggaatgctaccaaatgaaaaagaaagaaaagcccacaaagaagactggaaataaacaatcaaacaatgtgggagtaaaataaagaaagggacatttcatagaagccagccttgacagaggaagcccaggaggaaacaaacttacacagagtagctctgattcttttcatatgcttaaaactttagaagagcaacatctttgcacactgtgcaagagccatccaaatgaaacattcagccacactgctcagccacagtgcaagaatgcaacattttgttcaacagacttctggaaacctttctgagtgagccaccatttagatagatagatggcagctgattggcccagtcaaaagttattagtcctagaacaattccatgctttttgcataggcacacttcatgcctgctacatgcaaagcaattgtttacaaagtgaaaaaagttaattctatgaaagaagccaatttttgtccaaaactatgttttgacaatattgactaagtaattgatttatttttttcttctgacttgtttctttctttagaaagttggtgcagacactataaagtcatcctaggtatcatgggaagagtaccgaaatgtctgcccatttattctgttcaaagcatattgtatgcaagcaagttcagatgtggcttttgctccatatttactggtgcttaaaatgtatgaaatcaggctgttaaaatgcaaagacactgatgggccatatggaagagagttatcaagagttctctagtaagacagtctgccagccagattttacttgtttaaacactgagggctgcactctgccgtcaaaattgttgttgaacctgttgtgataaatggtagtgtgagacttatgtaatatattcaaggtcagatttcattgtttaaataggttgggagggaaaaaaatgaaaaaaaagggaaatgcttctccaagcccctgctaatgatatgccaggccagacaacattttaaaacaaaagtgacattctcattgatcaggatagctagtgcactattacaataaattgctgcttaattcctacgtcttcaggtagttgcagctactacccaaggagttccggagagcatcctgccaccaagcatcacagccctaagtgcagtggctctgcatctgagctggagtgtccctgagaaatcaaacggcgtcattaaagagtaccagatcaggcaggttgggaaaggtctcatccacactgacaccactgacaggagacagcatacggtcacaggtgagaaaacaaaaaaaaaggaaatcctactggaggagtctgtcattgtggttaggggggcaaagcatcccaggggtgtgtgtttgatatatgaggtcacttcgaaaggacgtgttctcttgacatatggtcaggtcccacttatccatgctaatagaagagcccacactggcagcaatacgccacaacagcagataacttcagaaataatttatatttggccttgatatgcattatgtgaagggtttttgcatcagtattaactttttttttcaaacaaacagtaagatgcattttcattccccaaggatatactcatagttaatgggactaagatagccaagaatatactggaaggcaggggaaaatcagccagaggttaacatttgtctatcaagtggataattaatacacaggactagttgacagtggagtcattgtgactgtttgttactattaggaatgttaattaatagcaattgtgtttttttaatttattataatgtttattatcattagccttaataatatactattagtacagtacaatgatatgttagataattgctagtagtgattatgataataattaacaggttttagcttaaatgccacttctgaagggaggagaagcattttctgacttacttgctcgaataggttctctaacacaccaccacatcactttgttttatttccatcatagacctctcactgcctgatattttagtgtttgttttttgtctttttatgtctctccacacttgaatgtaggctccaagagagcaggaaccttatctacttgttcagtgttgtacctctagcacttatagtcctgaacacattaataggagctaaataaacgtttggggaagaagggaacttaatatgtgccagacgctgtcctaagcactttgagtgcactatgcaatttgattctccatcaccaacctaagatgtacagtgaattactaccttcattttacagaaaagaatactttgagaagttaagtaatttagttcattattcgagtctactgaatcatcccaaacaaccctgttaagtttaaattctaagaccatgggcaagattgtataaactttcccttttttcccattgtcagccacctccttccaagacttcctgagtggatgacctccttccattggactgcactttttgcagggggtgttgatagcacagataatgaaactcacagaaaagtgcagaaaggccttggaaaaatgtgactgatttttcctaagaagggacacaggttacacttacacagggtggcaaaataaattcatcacttttcactcttaaatgccacaattccctaacacataagcaagcattcattgacaaaatctccagtatttttccaaaagggccgtaaacctgcagaaggtgcttaatacaactcttggcctggcacattgtattccttacctcaagatcctgggctaaatcaatgatgatagtgttgaggctgggtgcggtggctcatgcctgtaatctcagcactttgggacgccgaggcagccggatcacctgaggtcaggagttcgagaccagcctggccaacatggcaaaacctcgtctctactaaaaatacaaaaatcagttgggcatggtggtgtgcatctgtaatcccagctactctggaggctgaggtaggggaatcactccaacctgggcggcagaggttgcagtgagctgagattacaccagtgcactccagcctgggcaacagaacgagactctgtctcaaaaaaaaaaaaaagataatggggttgggagaagccctcatatttgaatgatcaaaattatttcttttatcttattttacttgaagtggaaatcatcacaagtgattgaaataatggtgttttacataataaaaccttacttctatgtggtgctttatcatttaaagaaacgtttgcattttgacttctctgactctcatcacatccttgtaagagatgtttttaataatcatatctgaaagatgaagaagaaagccaacctactcagcgtatccaaggcattcactgcctgtatctgaaaggaaatcagaatatcatttcgttctcccaaaaatgaattgccagcttgcagttttccagatagtacactaagtggtctaaaataagactgctgctcttaagatcctctcacgtacagggaagactgacaagaaaagaaataactgaaaacagagctctatacaggatgcagtggtgaaaaatcaaatgagtcacttggagtaagcaatgggatgttaattacagggttttgaaaagcaagtttaggcacattaagactgtaccagcaaaggtttcacaataattgtgatataaggctaaagaaatttcttcttgtagtatctatcaacttaaccagcatcagcttcgaattgttgctactttattggtttgcattttttagaaatcagcatttatacaccaacagaccaaattcaattgtaatgttcaaaccaacaggattgatagcctcattaattataaaataattgcaaagatttttctctaaataacttcaccctaccagttcttcctttcattgacatttttaatggctatttttatgtcagagtagatttcatacatgtatcttggtgccagaaatcctattattagcataaatattttaaggttttttaatataattttaatttttacttaacagtaaaaaatcataatctggtaaaagcctttaggagtcctttgaccaatctccctgttctacttttgatttgttttaatttctatggatattgttttaaatagatttagagagtatttcacttgcccaatacagccctaaagaggggtttctttgtagaataaagaaataagtcctcattcagcaaaaccttaccaagtacagagcctcctatatgtagttctttggggacaggaatggtgctaggcattagataatcggaaacttgagatctatataatgttactcatttgcccaggaaaattcagttccacggttagctgactgaccaaatgtagtactgaagtattttatggtgtgaatgactgttttattgagttcatggaatgaactaaaataatcaaatttattttctgttccatcttaaatgtttgatggaaatgctgcctgaaccccctaggataaatgttttgattttctcatcatttccaaaagcttggcattccctaagcaacacagcactaataaagctgtagcactagtcgtcctggagcctgaaaatctaggtccttaggaatgacaggagggaaagggagcaccttgcctcggccccattgtctccatgcttatttttaattacctcaaagctttagaaacatgatcccgtaaatgctttgtgggaatagtggcgaatgcactcatcatgtgaaatccataaattgcttataatcctctcaagatgttaaaaaaagcattaagtaattgaagacaggaagtcctcggttaattatttagaggtgttatcaatgctttaagtaaactgaagcgttttctgctatctcactgagctgaataccatggggacgaaggagtagcagccatcatcttctcatattcgctaatgcaaacagcgcatggcagcttgtcaataaaagaccttttcatatcatttattactaaacacatccaccatcctgtacagaacaatttggacatcagttatggcattgtttcactttgggctacctctacattatacgtaggcctcctaatgtgagtttaggaatagaagaaaggattaactaaataattaaggccactgagaaaaaaatgaattagtcatgtcctgtttagcataacgtataataagggcctatgtgtctcttactctggaaaactattttcaaaataattaattagaaattactcatcattgcatttcatttaaaaggaaaaactcaccagcattaaattagcaaggaaagaataatttactttcgtttctcatcttcctagaagttaatgaaaactttgtgtgctaaatagaacaaaccctaacaatgctggttgtagcagaaaatgtaatactaatgttatactgaaacagataccttacacttcaccttggaaaaagagaaaacatactttaaccaccaatacaacaaaatgtagaaattctttgtaagggattttatttttagataactctgctatgtgttcccatattatctttgctctcgtagtaattatcacattttattctaatagcctttcctcttgtctctgttccacacttagtaataggtaatgctttttaagtacagagacagtagcttcctgtttgccattgtgttcctggtacctatcacagtacttaatatattcaaaaaatgtttgtcgaatgaataaatactgaatagtaaactagtatttgactacattctgttttgaatggagataaaaatgccactgtcaaacgtatctaaatcgcagacagatctggcaacaaaattgtggggtccagtgcgaaatgaaaattcaggccccttgttcagaaatcattaaaatttcaagacaatggaagcagagcatagaagtaagctcatgtgcttccaagcatggtaccgtgtttgattgcacagtcgaagcccacaaagccaaccctgatctccagcagtctggaattagctgcagtatatttctttaattaaaacagatagcaagaaaactaggatggtgataatgtcctcaaaaagctttgggagtttcttctatggttgtttgcaatgctccaggctgcattccccccagttactatgtaattactgaccaccaagcactggggacctgtgaaaatagagataagaatttgttttcttttcattttttcaactctgagaacaactaaatttgtgcctgaccaaaaaagtaaaaaaaaaaaagaaaaaaaaaagtgtggcatcaaccacttttttgtgttttaaaacctgcctattgataaaatattaaggccaaagaactataattgatagctgcctagacaatgatattttttaaaattccccttaaatcccagatattccaatgtactttgccagatactagttctgttttgtcactccagttctggccacccccttccctctgcaatgtcctcattgtctcacgtttgagcaacatcagattttgctgccacctgacatcacattttgtttttagagaagaaaagtctgcctggaaatgcagagaagaatcctcagtctagcataacactgaacttgaaagaggaaaagtatttattaaaatatttattaaaatactgtcactaaaatcaaaatatatatatcacagatataattcatattatatttttgttgttatatttattccagatatacatcaacattaagactattatttagacaccaccaaagaaaaagggtctttccttggtggtgtctaaataatagtcttaatgctgatgtatatctaaagagagtctgccaaagaagtaacttgtttaggaaaggcgtcttgggatcaggaagatattggagagaggggcctaagctatggcccagaatttcaaatgaaatatagaattaataacgcaagttagcttatagcaagtagtcagaactaaaagtcatgaagtgatcttactggcatgtgcaatgcaagagtccctttgttttgatgttttgatgttcagttcatatgaggtagcaactgaattcataaagcatgaatacagaaaatggacagtacaaatgctgctcaatgggggggaggaaattggcttgggtaagtggaatgggcagctgttgagattgtgaagaatgataccatccagaaaagatggctttagcatgtgaactcccgaaataatccttaatcaaatcctgtaaaacaaattctaatttaaaggtaccttagatgtctgtaaagtaattccatgatgcctttgtataccagttttgaacatctggattttcacagattgtcagattgatctaagtagaatgctgatatggctctatccatcacagtcaagatcaccaggggatgctggaagttcctgggaatctcagtaggcagagatgctccgaaagggatcacttagtgagatcccaggcaagtgagggcaaaaggaagcaacatcattatagttgtctgggtatatactctggggctcgttgtcttgcgccaagaaagaattcaggacacagacacatgtgggtgtgttaaggagtggaaagtttaatagaagaaaggagagaggagagcagctccttgtgagagagagagagaaagacagagagagagagagagagagacagagagagagagagagagacagagagacagagagacatccgtaaagtggggaggcagcggaccaaagcagattttacaggcaggctggagaaggcagtgtctgatttatatagggctcacagattggttcgatcaagtatgacatttacatagtgggaggggaaggctggtcaccccaccctaatcttattatgcaaatgggccttccagttgattggttccatcttgtctgagccttacagtacaagtggctgacaaggagaagggaagatggagcctccatcttgaacatgtacagtccttagttcctgcccacattcacccatgcaagcacccagcttgtttacctatgtctgcagctcgattttacatgcttgccctttgttagaaaattatttggggctttttactaaaaagaaaaggcttaccgaggactcccatacctttactatctgcctaagtgatttcttcttaactcctgtatcattagcaaggactgaatgtgagcagccgaggggccagaccacacatccagtttgggtgaactggtgccaggacagatgacttacccgcaggatggttattcacaatactttataagcaccaaacaaaaactttttaacgtaactcaggcctctcagtgcttgagctaatcactaaacatgctgatggaggaactcactgaattacacatcctttaggactatttggtaattctttagaacatagcagatgacactatagaataattggctgaatgttttgaagtagcacttgctatgtgaaattataatggctaaagtgcctttttttgactatttatcaagagattaaaaattggaagcaagctgttctttatagagtacatcaaatgttaactttcatagacatgggttttgttttccaaatcatatttttatgaactaaaggcagactttttgcagtcccttttagcacacatttactcttcaaagtaatgttacttggaagtgtaattgtaatgagtttggttatattatgcttctttcctttaaaaaagaacatgattccctgtagggaaattcaggtaatttgcagccacagtaatcttcactatactgaaatgttaaatacttggcttttctccatgtgtttgcctttctgtactctacaagtgctatttcctactcttctaattcaatgctgagcacttgaatgatgttttcttttctccttctactcttcgacttcaggattaagttacagttggaatggttcctttgagacatctctttatttccctcttctcatcctgatcaattcatgagtagttttcaattggtgtgccctttttattgcctgttgctagtatgtcatatatatctcattttaaggactaccgatagaggcttacttaaaatgacagcaaattccagttgaaatgtgttcattttattgagttttacagagtcgtatatatgaaaggtcatcaggttcatgtaaatcatctatgcctgatggtagttgatgctttcttacagattatctgaaccaagcctattagtaatccagtcctctaacaatatgaaaaatataaaaactaaaagatagaatatggttttaaattttctaaattatggatttagatattgccttcccttaaattaatctgtaggcctattaagcagtctctactatcatgcctacagtttatagatatagaaactgaggaacctagaagccagaaaacttccttgtagtctagtacttggtaagtagataagtattagaacccaaatagtctaatttcagactgctctcttagcacagaacatgactcagtatctcactacatgactcataataatattcaaaatgaaaatatttaaatatatagtcccacttgaatttttttttttttttttttttttttttttttttttttttttttttgagacggagtctcgctctgtcgcccaggctggagtgcagtggcgggatctcggctcactgcaagctccgcctcctgggttcacgccattctcctgcctcagcctcccaagtagctgggactgcaggcgcccgccactacgcccggctaattttttgtatttttagtagagacggggtttcaccgttttagccgggatggtctcgatctcctgacctcgtgatccgcccgcctcggcctcccaaagtgctgggattacaggcgtgagccactgcgcccggccgaattttttatattactggaaatttgactgggctttgagctatttatgtcatcgtttttgttataaggctgggaagcctaacccagttgctctgggccacatttctcagtgtaattgcccaagttccaaccttggcctcaccctttccttttctttctttctttttttttttaggcagtctagctactatgtcacccaggctggagcatagtggcaggatctcagctcactgcaacctctgcctcccaggttcaagcaattctccagcatcagcctcccaaacagctgggactacaggcatgcaccaccacgcctggctaatttttgtaggtttttttttttttttttttttttttagtagagacggggtttcactatgttggccaggttggtctcaaactcctgacctcaagtgatccacccgcctcgtcctcccaaagtgctgggactagaggcatgagccaccgtaccaccggtcccggccctttcttatgtctgtgatcataggtactttcctccaactttctgtgccttagcttccttatctgtataatgaacaaataatagcgtgcacagcagaaagttagtgtgggcgttaattatattaacacccatgaagtgcacagaagagggccaactagtagtacatgctcaataaacttttgctagtatgtcatttacataatcttataactaacttccttgaaaataactgcaattctcataaaatatatttagataatgtatagagtccaatgaaaagagaattaaaaacagaccaacaaaaacaaaaacaccctgagttttgtctgttgggtattttttttcttaatttatagtttttgtgctggtgtttgaactacattcttttaacttttttttttcgttttgagcaactacagtgtatacaattatgacttgccaattaaaataatattaattttaataaagagcagctgcaatggtttctaccatttttatgtcttctaaatgctgcttaatcttcagagggaaggcagccattgagtaacttaaatactgttagctctagctcttatgtgatggagaacatagagcttggtattcaggcttgggtcatctatgcactcctcagtccaggtgaagtcaacgctaaataaagtacaaagcctgatagtggacaaatgactggcttatccaaggaaaatgtgagttttgttataaaaagcaggaacagaccctggaaggtaaatatggcagatgtgaagttgcttgacacacattagcaaacatcatttgaaatgagcctaagtattactaccctttgcccacatggtccattaaactggtcagcatggctacatttcagggacagacacagctcttgaggataaagtgccaatgaattagagtaaaactgtcattctccccatattcacttgcagacatgtctcccactctcatcctcctggttcttcaatctttgtctcctttcctcagtgcaccatgttgactcctcttgatttgataatatgtttgaactcctctgacttcttgacgaaggttttctgctcagtgctgagtctgccattcctccttgattctagtaccccagtagcttcaagagaagcaaattccttccaccagccctacccccatatcctgctaggtgaacctatcccatctaatgtaaacacctgtagcaaactcctttgatgcactttcctccctctatcaaaaatccttaaggtgctggatgctctactgctgtaccatgcctaaacacctgccttctcaaattctaggctgtaagtaaaatggagaccactcaacttgcagcagaaaggctttgtcaagaaatgacaatttatatttttatatacattaattttcctttcagctacgattctcattacaaatacgcttaatcctctaatcaaccttagcaaacctctgtgattatgaattttcttttttccctaatgcccatcctaaaattttatttaacagtcactgcatgtctgaaatcagaccagccacgaccacaatgaggaagataactgaggccattgttttgctcagaatattcgagaaaaaaatttaaatatctgtttacttttagctaccatatttacatctggcattcaggaaaaaatctagaatatgtgtattgcccacaaattatattagtttctgttattttattaatattctgcaactaaaaaatatctccaactcaatgaaatcattgctgtggacagggataccgatggaattatgaggaaggacctttttggtcaggtcacatggtgataaacatcgtagcctcatatccctgcaatccttatgggacactatgatgggcatgctcttctttaagcaatatttgttcaacattgaatgcctaaaaatgggcactataggggaaagtgacctcccaaaaagactcgctcagtgatgccatttctactctcaaagggcttatattctaaatggggaaaataagatattcaggtaaaatggtatcacactggtcaagacccctttttgtcggtaaagagaatgaaggggagacattgtcgagctaaacgagtttgccactgcaacctctgagtttcattcttgaatgttcccttccattattttgagctttacattttgtaatcatagcattttccgatgagcttttatcaaacatatgtggcttgggtacggcttagatctttagtcatattcttcatctgtaaatcaggtaaatatcaaaattatgtaaatcctccaaagcaaccaaatggaagattgtaatcaaataagtgcctgcatcttatcactaagttgataaaaaaaatacaaagggctctgaagctaaaccttggagcagctccagctgcagaacattattgctttagcagagaacccagactactgctctcattctaaatggatgagatgggtaattttttcattcgtttaacgaacacacactttgtgcctgtcacaatcctaaggatacagataggcaaaacaaagttgttgttctttcagagcatacatctaaagcaggagacaaatatcaaataagcaagagacacagcaaacatcagagacggttgaaggctctgaaataagaaaattatgtgaggggataaaaagggatgggtggattgtttagataaagtggtcaaaattttttaaaatgtagtatttgaggagaaatctgcataaatagacaaagtgacacattaacatctctgaaggaacagtcattccaccaaaagaacaaaatatgcgaaaatgtagctcaaaatacgtgaaaaaataagcataacaatcattggattcatctgtaacttagttcaattatttaacaaataggctcagtcctgttgttttaaaatactatttttttctcaaagagagctttggcattgtttgaactttcccaagagtcaagagagagatgtcttgtaagcctcaatatcctccttgttgaatgctgctgagctttaaagttgcttctgctagaatgaaatactactttgagtatcctatttcatcttctcttgtctgctagatgctataatgattccccattttacagatcagtagaccaaggcaaagagaagctaagtaactctaacaaggtcaccagccacgcacagagcagcgaaatctaacaatatacaacttctattttagatggattgtcattcttttctccctgaaaacttactgaacaattaccatactgcatcatattctgaatacgaaagaagtaataagcaccatctcttctccaaattagctttaatctatgtgtaaagacaaaatcaacacacctcaaaaaagggcgcattagatacagtgcaaggtttaaaaacaaaagtgttggttagcgttaatatgagttgaatatggcttggggcaagaaaatgttggatctaaccttctttttattttcctgcccgtatttatataagaagcaattgcagagactgggatggttagcctggagaagagaagactcaggggggatttgataactgtctacaaacatttgaagagctgtcatgtggaaaagaaattagatttgttctatatgtccccaggggtgaaagtgatagaaagatttcatcacaatataaggaaggactttcaaacaaaataaggataactctaaggctctctaaagatgtaatgggctctttgagagacggagtgctctgatccgataggcaggacagccttttcaatgacatcttgtatagggaatcaagagaagggtggatggttcacatgaattttaaggtcttttctatggctgagaatttattagtttatcagtgataaatgaaattttgcccaatacttagcctcttatgaggttcagaccttctttaaagagtgttttagagagtactcttaaatgttttggctatcatatctacaactctgcatgttacttctggtacttaattgataataaataatcctcttaaggtgcactttatttcttgcttgctttttctaggtctccagccatacaccaactacagcttcactcttacagcttgtacatctgctgggtgcacttcaagcgagccttttctaggtcagacactgcaggcagctcctgaaggtaatgaaacaatatccatggtttgagggaagaaattttcacatagcattttgaggtggaatctgtaaactccttcataacaaataaggaagaggcaataaagttgataggtacaaaataaaatagcattctaggttcccattcttcaggcttgattcatgtaggtgtagcttcccaaggtcagttcgctttcaattctttaacctttatagagttgattttctgtggaaagaagaattattgaaatttttcaaaaactcagatgttaaatattttgggagcatctaatatataataagcaccatgctcactgctgaagttgtttaaaatgttctctgccctcaagactgacaatcaagtagaagtgataggagaaagatctgtatgaagagagaaaatctgaaagttgatgttaagaaagaacaaatgaatagagtgctaaggttggcctgaagaggaagagatagaaacccatcgatgacatcaaaaaaggctttatggagcagatgacttctgagatggaccacaacaaacaaggattttgacaaatgaacagtgatgtacagagatgtacaaccagacacagttggaaggaatgtaagatggaatcatcaccttagaaggcaaattgcaaatgtctatcacatttaaattgttaatttcccatgatacagctgttctattttcatcatttatgccagaaactgtgccacactgctcaaggaggcatgcaccaggatgtttattgaagcatttattttgtttaatagcaaaatgttgggagcaattttaatgtttgtgagtagaattgctaaataaattcagctattctcatattgtggaattccatgcaccagtataaaagaatgagatgatcagttcatacaaagaggaagttatgacattatattaatttataagaacaaactgagaaaatggcatttattgttaatggttaataaataaatgcatttaaaaatccaggaagtatacacaccaactgatagcaatggttacccatgtgttcagaggtgggatggctggtgtcatttactttcaaaagaaaaatatactcagtggcatgtgttagtgatcaactaattattttgttaatcttcattatctgcctatttttcatatggggaaaccaaggcataaataagtttctaaacagaaatgcaatgttaattaccaccatagactcctgaactacttgtccattactcttctaatgaaatggattgttgtacctcggaatattagacctgaacttcctaccagtaaatggggaataaaatggaaaattccacatatggggcatatggctcctcaccaggaattcactaatgatgttttctatataaagaatgtttcatgtcaaaaagcttagtgttcctttgaaaggaagaaaccagcagtggattttttggaaaggtaaactatcaaatggatactttgatgataatggataatttctaaaggatctatcaaccagatttggctgaaactcaacctgataaaataacagaatctcttgttccatttctctctaccaaattcatatatttaaattcattggaaatatgaaattttcccaacaaaatttcttgaaatgacttacattttatgacttaaaaattgtagctttcaacagtgcagggtaatgtgatatgagaaatgcccttgatttcttttttttttttaactttatgtatctttcctctaacacaaataatcatgcaaagaaataatagatgaaatggactttcctctgcagaagaaacatggatttagggccattttctggctgaataagtgccatttatatataacccatatatgaaataaatatagtgtgaatgcttaacttgggaacaccttagcaatcacattaagttctgttgttttactgtaaagtgaaaacaagtataccactttagattatccacccagacataactaattataaaatgccattttcgaagtacatcagatataatttgaagatctcatatttgagtattttaagtggacatggaaagaattaaaagaagtgtttatgcatagccaacgcaagctgagctcttttcacttgcctctcattttcaatctaagaaaaagtcaatgtacattacaacctcattgacaagttggacacagttctctacagttttatcctcatagaaaactgtgtacctgtacctttagtcaaataacaggaagattttgaattgaattattactctttttttctacaattactgccatccatgtgagttctaattcattttagagataaatcatgcaaaattgcagacatactttcctctagcattgataatgtggaaacagaaaggaaaagaagacccagtctttttcagttcattccagattcctcttcctctgcccttcttttaacgtttacacacccttggttttttcctctactctttacactatagcacccaggctcttctggaattttcgagtactggctttatctcctaatgaaggctgagagctaccaaatactaaagctctcaccaaagctacacttatggatttaaatcctatgtatttactggtctactacatgtttatatttaggtgtttttcaaaaactttaacctcagtacttcgccacttaattcttccactccactctactcctcaacttgcttttcttctctcaaatactaccacctacctatcacctaagcccaaagcttgacactcttgatggctcccttttccatatgtaatacataattttttataaaatctaattagttttaaatcttaagaattttttttaaaaaaattgttcttctttcccgtcccttttaacactgccttagttcagatcctcatagctataagaagagaagttctctggatcctcctaactaggatcccttcctctagtcatttttcctctttctcacatcccacatcctgattctttttcctcttttgacaaaataagaatatgtcatattattcacctccataaagtcccatttccttccaggaagacatacatccatatctccttagcaaagcaacatggacccctcaagttttaacttccatcaatttttcaaggctttccatcttccccacatgccatgcagtgcaccagccatgccaaggtatgtgcagtcctgccatccttgcccacatttctacgactttatgtgggttcccctcagcctgaactccctttccctacatcctcactcagttaacgctcaccttttcaaaacttggttcacgcatctccccttctggaaatcttccactacaaccacctacttcctacccatctccacttctccccacagtctgtgtcaggttaccctttctaagtgttctaacagctactgtgcctccttctcttaaagcatgtatcatactggagtacaactttttatcgactcatctttattcaccatgatacatgaactccatgaaggataagaaaaagtctttatcttcccatccacagtgcccaacacagaaaatgacacaaagtcgggtagaatgttgagtgaataaattaacaaatactaaattgtccagaattcagtgcatccctgacatcagctaatacaaaatttgttcctatcaccagatttcaggagaaaaacaatccacaataaatgctgggaattttgaattggaatgaagatttgtagggacatgagaagtgggtaatatggcatgcaactcaagataaatttaaaacaaatacagtagacatgttctacttgttgtcactgtgtaaaaaggcccaccaaggtttaattctacctttccccttttaaccttgcagctagtttaccccaccccatcctcctaggttacttccctccctactattcatttctttcacttgaactgcctcagtttgctcccttattatatagaataggtttttctggtttcacctgagacttaggccagagttacatggtgaaggggacaaattccccacctcggactcattaatatatctcaccaaagattgtcttactctagcaaagatttcttgcagctgccaagataacgatgtccccatatcaccatccaagtaaaaatgcagcactttctagttatatatacatttgaactccatattatcaatcaaaccaatgggcatggagttattaccaacttgaaaagagcttttgccagccggtataaataataaactcaacttttacctaaaggttgaaacaaacccaaaattatgtttcattttattttattagctcctccacatccacaggctttattgactggttcaaatcagaaaccaagcaatagccattctagtaccttggtgatttttaatacatcgttcaaggtgaaaaagatataactgcaggaagcagattatgaattaagattttatactttatcttttgaatcaacaaattaatatcacatttaaatcaaaactctgattggttgaatcatctagcagctgttggcagagaaacccacatacaaatgtgtactatgatttgtgaattttaccaaatatctagaacagagcagactctcagaacaaaatgaactactttcttctcaggaatatattgctccttagaaagttgggatgtttgagacatttttgaaatctatcttgtttctttcaggatgctgctaaataaattgcattttgttcttctgaaaatttttcttctaaaagtgtcaaaatcttaacctgtacggagtaacttacacaggagatacaatcaagcaaaagctattgattacagggaacctaatattgaaatgagttttttttaatctccagaagagatttacagtgtctaatcagagtataactagatgacaacataaagtggtaggactgaactttctcactgctggcttctccatcgatggatttgtacatctataagagtacttgaatgtttgacattgaattacagttgtttgtgtgtatattttattttttagacagaagtataaactccttgaaagtgagccacatcttagtcatctttgcattccctagaactgcctgcagtgcttagcataacattttgcaggagatatatttacaataaatctactcattaaacatgtattaggcattgtgttatccatagagatacattgacgaataagacagagaagatccctgctaccatggaactaactttgcatcaaagtaagagaaaggagaggactgcaccatcatataatgtaaaaataatagtatgtcaaagaaagaatttgattatgatgtcttgagtgttaagaaggaaatagaaaaggccatgcgatacagagaaactaggttgggactccattagatggggttcaagttagagttaagagagtgctaaaatgaggccttatcaataaggtgatagttacacaagtaactgaactatgagaacatatgagaacattctacatataagaacaattctacatatgagaacaaaatgcaaaaatgtcatgctgtaagggaacaaaggtgttccaggccaaaggaaccgaagttcaaaagcccaggtgtaggaaataactagaagcattctagggatagaaaggaatctggtatggccacagctctgtgaatggtgcaaagaatgctgccacttaggccagagccaataaaatgtgggaccatatgggtcacaaaaagaaattgggattatattatatgaataaattcaaaagggttatatggttcataaagatgacactggcttacatattcactttatacacttttacaaagattccaatggaatatggaaggccaagatttcgacatggaggcaagtttagaagctatgacaggagtttatgagagagagaaacgtggcttggaccaggagaagtgaaagtaaagatacaggaaagtatacattatagaatcttctgggctttatgttagattacatttgggcgtatgaaaggtgaaagtctcagggatcattatttttgtgtgttttgtccaagaaaatggatagatggacaagattgggaggtacatagattgtagacaggaaaaacaagagttctgttttgcatgtttttagtttttgatatatcatcagtcatccaaatggaggtgtcaagcaaacagttggattcttgagtctcacactcagagtttcaatctagagatatgcctttgggggtcttcagcatatgcatatttaaaacccatactgaatgaagatcacctgggaagccggtgttggaagagaagagaagagagaaaaagaagaagagaaaggaagagagaaaagcagaggggagagagagaacagagcatactgctctgaggcattacatcctttcaaggtccaggaggggaagagatcccagtaaatgaggccagaggcatagccagagaggaaaagagaagcatcacactgatgtgcaagaagaagggaaagtgcactcatttgttgaattgtataattcaggtacatactcgattatgcttactttcacatattccaggtaaattgtattaaaaagtttgaaatccccagatgatctctcaggccttgatttaaaatactctcagagtgacaaccaaggcagagaaattatccactgctagttgtctgacattcactttccaaaggcaattcaaaaataaaataatcaaagtaataaaaatatatttacaccaattatgtatttttgttccatacagttagatattttttaaaatcaacagaaaaaatatcacagttcatgggggggatggtgtgacttttgatacactgtttattttctcctaacaataaaacctcattgcgttattcttgccaggagtttgggtgacacctcgacacattatcatcaattctacaacagtggaattatattggagtctgccagaaaagcccaatggcctcgtttctcaatatcaattgagtcgtaatggaaacttgcttttcctgggtggcagtgaggagcagaatttcactgataaaaacctggagcccaatagcaggtaaactaaaagaaaactttaccaatcatacagcaggatttgtacatttctctgggttgataagaaatgcatgtcccactgaaagttgttaaattgtttaattaacttcctcattcattggccattcaataactgatgaaagtgctaaatcattcagtctttagacttcacgaaatttcttaaaaatataaataattcgtcttctgtttgacataaaagcatgagaatttttaaatatacaaaatacatgaagtattaaactttaaaaattaccaaattatcttcaaaaacacgcatccttgaactagcaataaaagagatgtaaagagttttgttttccgtcaactctcttttcttcttgtacagtgtttctctacttgctacaccacatatagttgtgaatagttttagaggaaaaagttccacatatttgcatttcattcccattcatttctcagcagagacaaaaacatatcttaaatcaacagatgttttactgtagaaagtagagatcaatttcattttattgtaaggaatagcagatcaatttaaaaacatctttctctaaacatatttccctgaactccaacctatttaaaaatggggaagattaatttgaatcctccacaatccaccagcacactccaagactttcctgaaatcttcaagaaaagctatgaattactagcaggttaaaaataaatttaagagcagctgaaattacaatggcttggagacaatgttgcctgtgcaagaaaaactaccaagtcaagtttctggaaagggggcaaagagtttgcaatttgtcacaaatttaggactaagcaattgatacaaaaactagtaatcattgttcaagtctcttgtgcatggccttaccacaattcttctttctttttaaatatagatacacttacaagttagaagtcaaaactggaggtggcagcagtgctagtgatgattacattgttcaaacacctatgtcaacaccagaagaaatctatcctccatataatatcacagtaattgggccttattctatatttgtagcttggataccaccaggtaaaaaaaaaaaagaagtatgtgtgtgtgtgtgtaaacattttaaaggaattaattagagataagaatagaactgttaatttagtaaatcagaaagacatagtcggtctcctggataaatatgaacagaaaaatctaaaccacacttctaagtgtatagacgcatgagtacatacatacatacgtagagatataggtatctagatgtcgatgtagatatgtaagtatatacagctttctatgaaagcaacactttcaagtacaagagactaaaaatctttttactcatctattttttttttttttttgagacggagtttcactcttgttgcccaggctggggtgcaatggcgcaatctcagctcaccacaacctccgactcctgggttcaaacaaatctcctgcctcaggctcctgagtagctgggattacaagcatatgccaccatgcccggctaattttgtattgtttttagtagagacagtgtttctccatgttggtcaggctggtctcgaactccagacctcaggtaattcacccgcctcagcctcccaaagtgctgggattacaggcatgagccaccacgcccggcttactcttctatatatccaatgcaagtcatataggtcagaattaccttgaacattcatttccatgggactccttagattggatcattgacattataccattccttttatattaaatcagtgaatggggagtttggaaagacagttgttcacttcacccatgtaccttgggttgtgaccacttatggtagctgcatttttcctctgtaagctgaatagccttcattgagccatttagtcattattgggttgccttgtgacttagtgcaacattatattttgaggtaagcaccatcctcaggtaaaatcctgactgcattaatactgtggagtaaagagtagagtgagaaaggacatatggaggacttttctttccaagtaaaatttaaaaatggttaagatgttaaaaacacttcaaaattatgtgactttatttttaatatctagtcttaagatgaaattgtgacacgccctttttgtcgccatcagaataagtttagccacagttcaaagtggcaccaaatggttaacagccatttgagccatcggtagatccattccataacataattaacataagcctatttttattgaattgaacagtcaaaacaggtactattgtatagctataaagagagcgtaaagacctaatacataaaacttaagtttcttatagaccaacaccttctgctataatctaagatcaaagagaaaaagttattttcccctaaaattcaaaagaaagtttacaaagagctttataagcaaagaaaaatataagttgctctaagatattaaatgtacatgatttcacccacttttgtttaaaataaatgtgcagcatattaaacaaaatataaaggaataattagtagtggcagaatgcatcacaaagtgctataatctttatgttgtaagagcatagatattcttgaactctgttcttaatttcgatagaggaaaagacatatcttctgctgtgggaaatatataaatttacagccccctttacagaatttatttctacttttgtttaattttatttatttatttatttatttatttgtttgtttgtttgtttgtttattttgagaccgggtctctctctctgtcacccaggctggagtgcagtggtgcaatctcagctcacagcaacctccgcctcccaggttcaagcctcagcctccaaagtagctgggactacaggcacacaccaccatgcctggctaatttttgtatttttagtagaaatggggcttcaccatgctggccaggctcgtctcgaactcctgacttcatgatccgcccaccttggcctcccaaagtgctgggattacgggcatgagccactgcacctggccacgattttttagtatatttctccttggcatttttattgtgctgttgtgtttttgcaccacaaaataaaatgaagctggatagagccaatctaataccatatttagcctattgacaagaaagttttagatttagaccagggtcttctacaatccaaattctccaagagcaatacgggaaatttcagggtgatgagcaaggttgatgatttctttgccatatgactgggaagtcccatggtttatcaaaatatctgttattttaacattatttaacatatcagttgccattgctaatctgaagacttcatgttcagtacgaatttgaaaatatctttattttatgactatgcaagtaagagaaatgaaaaagcctggattcatatcccaatactgccacctattagctgaacttaaacggtctctaggcctcaattttctccatctgtgaagtggagataatgatgatacctacatgtaggcaggtagggttgctgtaaagatcaaatgaagtaatttatatgataaatatattatctagttctatataatattctatagataccaatggtgattgtttgaagaattatttttttatctttaattgctcatttttaaaacgtatttgttccaacatttgctgggtctcaaagccccaattttcaaaataataaaaccacctactgaggattggattagtaaattttcaagacctctttcaaatttcccagcgtgtcatttttttctttgaattcaatatcacacttaaatgtttaatgtatcatgtttccatttagaaatgtatcattgtggaataaaacacaactttcacttgtttaatatgaccttaactctcacatacctcaggctttgtataaattgttcattctggtccagcctaggggatattgtagaatgctttacacactaactctgaccatttaaccaatggttaataaatctataatattcagacctgtcaatcttatagtttaagatgcacagaatccatttcagaaaccatataatataaggaaagattaaaatcttcaattaaatctttttcctggtgtctagaaggatttcaaactcagtaaacagtcagatgattttgacttgtgtataatctacagttgattttattggaaagtacctcatgctgtgttttgatttggataataaaaacatgtttctattcctgaatagtcacaaatatatatattttaaacagaaagaaaataaatttgtaagtggagattgtttatttgctcacaatataaagagttttctaggtattcatcatactccctgccattacaaaatgactacatcacagacagagctgaataatgggcaaaacagtccatgcctgcagttcccaaacctgaatgagcattagaatcacctaggaagcttgtgtaaagacagattctcaaccccaaatttactgaataagaatctcctgggatggagtcaagaaatctagagctttttaaaaactccacatatgactttgatgtgctaccaagtgtttttgaaatagtagcccagaggaccaaggaacagatctaggtattgctgaaaccaaatgattctgggagaacaatgtttgactgggtgtgtagtggcgtgccaagactagaagagttaattgtggaaaatggcaagccgctgaagggaaaacagccacgtgacagcaatgatctctgcagcatgaagaaactagtaactagaaagctttacctacccatccaaaaatctaaaaggaatagatgtgatttaccaaaaacatggatcacactcaccaagtgagactggtgaattacaataactgttttctctgaaaacatgagtccgccagtttctcttgaatgtctaaagcaagcttatccaacctaaagcccaggatggctttgaatgccacccaacataaattcaaaaactttcttgggatctttgcaattatttgttttagctcatcagctattgttagtgttagtgtgttttatatgtggcccaagacaattaatcttctttcattgtggcccagggaagccaaaagattggacactcatggtctaaagccaaaatactggctaaattgtatttgtttttttaaatatgcatttttttttttgtggtcagtgtgaacagagtaaccttagacaggtaagctgctgggaaaaaaaatgtctatgtggttacttggcaactgaaaaattacctaagcaattaactgaattttcagttttcaaactattgttctaatgctataaataaactaagccttagtacatgtttataagtcctactagtgaaagggtaaggtctagggaatagtgacaatacccaggggaagagtacccgtgatactgataacaaatgtcgtgtacatacgttcatattacttggtgtatttgccatttgttaaattcctactatatgccaaacactgataagctccttctctgccttacctcagttaatttttatgcaaacgctagaagacaggtaataatatcattatccccatcttaagataagaaattcgaatctcaaaaaagtaatataatatgctcaaggtcacactgcagagccaggattcaaattcaggtctactgtctgctactgccttttaagaccagttcctttctgtctttggcttaacccttaaatccaaatcgacttttcatttcttgaccaaagtctctcagatttatgatggatcaactatgatgtttgaaatagtagcccagagggccaagaaacagagctgggtgttggtgaaaaccaaatgattctgggagaatatttttttttaattttttttcttttattatactttaagttttagggtacatgtgcacaacgtgcaggtttgttacatatgtatacatgtgccatgttggtgtgctgcacccattaactcgtcatttaacattaggtatatctcctaatgctatccctcccctctcccccaaccccacaacaggccccggtatgtgatgttccccttcctgtgtccatgtgttctcattgttcaattcccacctatgagtgagaacatgtggtgtttggttttttgtccttgtgatagtttgccgagaatgatggtttccaccttcatctgtgtccccacaaaggacatgaactcatcattttttatggctgcatagtattccatggtgtatatgtgccacattttcttaatcctgtctatcattgttggacatttgggttggttccaagtctttgctattgtgaatagtgccgcaataaacatacatgtgcgtgtgtctttatagcagcatgatttataatcctttgggtatatacccagtaatgggatggctgggtcaaatggtatttctagttcaagatccctgaggaatcgccacactgacttccacaatggttgaactagtttacagtcccaccaacagtgtaaaagtgttcctatttctccacatcctctccagcacctgttgtttcctgactttttaatgattgccattctaactggtgtgagatggtatctcattgtggttttgacttgcatttctctgatggccagtgatggtgagcattttttcatgtgtcttttggctgcataaatgtcttcttttgagaagtgtctgttcatatccttctcccactttttgatggggctgtttgtttttttcttgtaaatttgtttgagttcattgtagattctagatattagccctttgtcagatgagtagaatgcaaaaattttcttccattctgtaggttgcctgttcactctgatggtagtttcttttgcagtgcagaagctctttagtttaattagatcccatttgtcaattttacctaggcaataccattcaggacataggtatgggcaaggacttcatgtctaaaacaccaaaagcaatgggagaataatattttactgggggcatcaaaaccagaagaattatttgtggaagtggtgagcccctgaagggaaaatatccacattgcaacaatgactttttgcagcgtgaaggaagtagtaaccagaaagctttacctacacattctagaaggaatagacgtgacttaaaaccagattccaggtgtaggaagattttagttaggtgggaggggaggagagtcacttctcaaattgctgtaaagagatcatccaaattctattttaaagccttggtaaatattcccctgtctcccatgtaaaccttcatccactttaccttattctttcttgataaatgtcagtagtaacattaccaaaacactctaagctctagaaaatcaagatctctagccttttgtgtatcatttgaacctctaaatcaggtgacatacaaacaacatatccttataaaaattttgctgaattaatggaggaacacaatggtgagcgagcctccacaatttattatgcagtcaaatgtaaattgtggatatcctgccatttaaaattactcaaacatttgattttctcttaaagtcatccttcgtctacattaacttaatcttaaacagagacatacacacaaagagagagagaggcagagagacagagagagagagacatttcttctttaatgacaaacagagcacatacacatattttccaaagactgcatcttgtcttatggatgtgcaattttttcacctttcagaaaaggtggtattgttttctaacatggaatgggcttcactatttagttgtcctctggccttgggcaagctgcacaatgtttctcaaattcaggtttctcatctgtacaaggagaaattaaatgcctaccttatattgttatatgaagtaaatgagatggcatggtaaaactccattattgtttgaacctttaggtaatgtaaacaaccttagattattcctaagcattccctctcaccttttaccagctctcaacattgggtcaggacttttgtattcatattaaagagaacatttatattaaagagagcaaaggatatatgttaccttaataggtgaaaaattatggaaaattaaatagcaaatgcttcatggaacataagtggtttactcagaatgacaatggagatagatatccctgctgtttaagaatctaaacattcaaaattatttaaactctgaaggtaataatgagtctttctaatttatcgagatgatgactatattttgaactgttctagcccttaatcatgttctaattaacaatgccattgcatttaacacatactttttctcactaaggatggtgagtcatttaggtttaacgtacaatatagaaatactggtgcttttcctttaacattaatatcttactccattaaagaaggaattagcaagaattctactgataaataatttttattaatattgctctagaaatacaaatttttttatttatcattttgattaaaggttagctggccataatatggtctatttatggacattagacatcttggcattcagttaactcatcagctgcagtgtattatttcagatactatgcatttaaagtcaaaatttacattaatctttctaaaggattcacattacattaattgggatgattcaacattgacagttgtttcacttttcttaacttataaatgcaataaccaaatgacaaggagtggtgagtttcagaagaaaatgtgaaactcacttcagtggtttgtattttattttggatattttaaaatgtatctttcattactgagctttaatatatgctaggcattttgctaagagattaacatatatctcatttagtgttcataataacttaatatagtatgtcctattgttttgctcattttactaatgaaaaaggtcaatttagacactccaagctattttctctaggttattcttcaagcaggtgtcagagcagggctgaccctcatgggtgtgagtccaagtctgactcaaaactactattctatattttctcaatatttttccacctaaacgtgcggaaagcaaatgatttttcatgagttctactgtaatcccatttaaaagctaaaaaactgatttttgctttatatataggaagtatgaatgaggacaatgtaattcaggatcagtcgacccagtaacccaatagaataattttatttgtggctcaaaacttcatgagatgtaattcatttgcctttgggtatattgattcctctagtcatttaactaacgtggaaattatttctgagccccactcaggggcaaaacatgatgctggacaccctaaaagttacaaagaggaatgagacactgtccctcttgtcaggaaccctaccatctagtaaggtagaaaagacataaatgataactattatacaaccaatgttaaatttccatacaattggtatgaatgagttcaagagggtcccgttttacttctgttcccccaaaaaggcctaatcaaggtttccctacctatacagtggagaatttagctcgatttgttaaaagcaccatgttaagtgcaaccaagtgttttgaaacaaatgcctctatcaaaccgaattaatagtttttcctcttagaatttttcctgttccagctcctaaaaaaagacttaaaaaggattattgattgacttgtcccattgtaaagtatgcacctgctgtgaaatgaagccatggagaaaaatagttgaataatttaacttttttatttgtaaagataatcagggtttttctgattacatcttaacttcataaatgttaaataacctatcagcatctagttgttgtaaattatgaaaaggagcattgcaaggaatattaaccaacgaaatccttgttctttagtgaacaagaaaatgtgttatggcagcttgtcattgtgcgactggtaactttgacaccaaataacaaaactgccatttgcacttagggtaaattggttcacttgagcttccactgctcctcttgctctgacataaatttatgaactcaggaactaaccaagtcgtgtggcttcccagctgactttaacaaatatgcccatttcatttcatttagtcatcagaataccagggggctcagtcatttcagactcattgcagatggtatagggtttgtaggaacaccagagactttcgtgtcacagtcctggaaattatgatagtggagggggcccactttcctaaatgcatgccagtgttttacgtgttcacagcttagaggagcattttctgtttcagcacctcataggtatatgtaaaggacatttatttccaattaatgaagaggtgaaaaatacattttctatgctcatggtttggctagccatgtttaaatctggattaagattatgtttatatttgacatgcggtagaagcacagttttgttccttcatcctctgggagtcctgtcctttttataacagaagttacttcttgaaggatgcaaggcctggaagcagaacagtaggtacagactgaagacataaagtaaaacaacctcagatgaattggagggaacgccactccaaattactgctaacaatgaataatacagtattttcgtaggaatgcaatttgatcatatccaagtacacataaaaaataaaactagataacaaaatagtgttacaaagacattaacttgaatgaatgtaacatttatttgtagttggaatagcaactttatatgaaagatggattcaaaagtgtttgagggcacatggaaacagtgccatagttgttttttgttctttatttcattttgttccattttgtcttgtagagatgtcagccatttattaagtactttctatgttatgggaatatattgaaaggcttacagatattttctaatttaatcctcacaactctctatgaggtagctattagtatcatcattttacacatgaagagacaacatccatagaggttagttaatttgccagtggtcgcttgggaaataagggcagcagaaggatttgatctatctgacaccactctgtggtttgtctagttcaacaagaatgatggcatgtttcttatgaatgtgtgtctgtcaaacttttctgcaagaactgtcctaggaacaaagaagacaggatgaatatgcaatcccaggaggtctgaaaacagagcctgaagcaatcatcattagcttgcagtttctttaaggtcttgctttttatcttaaaaattcatgtaaatttgccattgtattccagtgtttgtcttcatccaaaaaataatatattatacaacttatcatttgggaaaacattttctactaatctcattggctaaagagtgataatgctgttatatttcatgatattaggaagatctaaagaaaactaagcccaataacaggttcaaggtcccggcaattcttcccctcttcattttgtcataaatatgtgggttcaccgtgaggcagaggttgcagtgaaccaagatcatgccactgcactccagcctggtggcaaagcaagacttcgtctcaaaaacaaaacaaaacttgggaggccgaggcgggtggatcatgaggtcaggagatccagaccatcctggctaacaaggtgaaaccccgtctctactaaaaatacaaaaaattagccgggcgcggtggcgggcgcctgtagtcccagctactcgggaggctgaggcaggagaatggcgtgaacccgggaggcggagcttgcagtgagccgagattgcgccactgcagtccgcagtccggcctgggcgacagagcgagactccgtctcaaaaaaaaaaaccaaacaaacaaacaaacaaaaaaaaacaaaaaacctgtggcttcaaacaacagccttttattcctcactgctttactgttatggcagggtaacaatagggagaaatgcccaaaatgtgatatggaatgctttgtcattctaggatactctggatggaaatttctatcagcatatcctcctgctgaaggtcaaattgcaaactgagagggtccccgattccttcttcaatctctcttaccacctcaagcaacaccctccaaaaaatactttttgcggagaggaagaagaaacctgattatattactttttattttacctctggcacagtacttaaatttttctcatccattaatgaactgagtctcaaatggtctctataatcaattctccttatccagctctcaaatttcattttaattattgcagtcttgttgagagcagtaaaaactgccagttttgtcgtggagtggtgaattaggcctcgaagaatagcctttaaataggcctattatgtgtattcaccataccagtaaagagaaaaataaagttattttttaggcatttaatttttgttatgatatcttttcctgtttctttatggagaaaaatagtatagaactctttattacctgaaacaaagtggaagtgtcatgggtcaggccaacttttcatcccatgtctagggtagaaaatccacattgagttcactttaaagcaatagcgagagactaacattacattgtcctttggttacagtatgaacagttatacttgttcagcacactggcacatcagcataaacattttcttgtgtcctacagttggttcattctgtggtgactacagagtcttcaactctacaattggctagcaaaaattctaatcactcaccatacatacaattctctaatcttgaacttttagaaagaaaaattcacacccaatttttgtgaacaaagaaacggggattctgctggttccccttcctcaaacagggaaatcctgtgtttcccaaattttccatatcaaagtgatactccaaaaaaaggcacagtaagtccttaaggtcatgataggttcttggaaactgcaattttgagtcaaaagatatataaggaaaccaattttaccttaggctagttgatataagcaagatttaagttgcaaggaatatttgtggtcacaaaaacgtcaccaaactaaatatcatcaaagaaagaccaaaacacttctaatattaaactgaaataaatatgagctatacatacatttaagaaagattaatagaaacaagtaagatcatttttaacctaagttttggcaagtcagcgagtgacaacagccatagggataaatgtttttgagcagaaattagaagaaattcttcttaccaccatgcactagtaaaaacaatcgcaagtagggcaagctcacagaaggcttttgtacagcattatttattattatgcatctatatgatagtaacacacttaatgaatctttactttacaattattcattcattcattcattttctgacacaccttttccagttcagggttggggtggccagggcctaaccaggcagctcaagaccattccgttacagggcacacacacacacccacactcgctcagactaggaccattcagacacaccaattaatttaatggaaacatctttaggatatgggaaaaatccagagtacccataaagaaaccacgcagacatggggagaatgtgtaaatttcacatagacagtggctccagctgggaatcaatttttttcctcataaatattaatgaaacaatgttgaatgaaacaacattattcgaggacctacggtactatgtttgttcctgtctttgaatatactttgacatgagcccacaaacctccaaagcaggtgtatttcaggttgggatacttggtctgcagaactttaaatttctacctataatatgcttgttccatcagtaatgatttttacttatccatcatttgtttccttgcttcggaatagtctccaagaatggctctgccttactgcacaaattttctcaaacctatcttgtcatttttccccaagttgtcctactctaagactccattatcaaggaaaagcataagtatattgatataagtgttgatatcagatgggcctaagttcaagtccttgcttctccaattaatcagtgtgcaatctggaacaagttatttaacttctctgagttttagttttctcatcttaaaaaatagtaatatttaccatgcagtattgtcttgagggttcgttcattcattcaatcagctaacatttattgagctgctactttgtgctaaagtctaggcagtggaaccacattggagaaaacaaagtcctaatttatacggttgacattctagtagtattaaatgggataatgcgtgttgcctggcataacacagggatgcattgaaatgactcttgtttgtactacttctgcaaacattgtaagactttcaaactggtttccctatgtcttgtctctcatgtttttaagccactattcatttcccaacagtgttatcattctaaaatataggtagactcttattttcttatttatacctgcaaagtctccttgttgctgattatatatgaagcccaaatttctcaaagaattaattgataaaatttagtagtcacttgagttttggagtgaagaaggcaggatccactctaaaagtcttactctaagatttccatcctaggaaaatgggaagatggtattatgacttactgaaagaggaaacctaggaaaaagaacaggtttgggagtggaaaatacagctagttctgttttagaattgttgagatcgtggcctctgaggaatatccatgtagaaatacctagcaggctgttgaaaatacaaagctgtaataccggaaagatagaaagctagagataagagtttaggaatcaatgatagaatgttagtagtttaacctactagaataaatgtaccagatagtttagccatgatgctctaaatttaaaataaacattctcagtctaagctgccaaatttaacgcaatctagcacctttcctgaggaagcaattgatcagtacttctgaagatgatcaatatctccttcagacacctctttttcatctatcctacacaaaatcctgagcatctttggtttgtaccagctcttccactctgtaaatacagaggccacatctataaaaagcaaaaccacatttcattctttagacctcatctctcttaggtcattgagtcctgtgcttcctcagtaatgttatctctagattccactgtttctaaagtaaagatagacttatgtgggtactacagaagtaaataactaaactcataaatgttaaaaactctcagatcaaggagacaatgtaatagaaaatgccattatattcttcattcaaaactcatatcctctccttgaaaaagtatgcctgttgttcatgaccaaataaaacttaacaagcatttaattatataaatagactttgacgaggctaaactgacaagacctactttctttaggaaggaatggtgaaaaatgacaattgttgaacccaaattttcgctgtatttagggccataagtctcactgacagtgaactgtcctggcccaataattaatgcactgggaattctctaggtagaccatgatttggatatttcatgggctatgtcaaggatccatgtcagacaggaggcatacacaatgctctacagaaaaattattgtcacaagcaaaattggtgttgttttctatgaactttaaaagtaagtaaacctagaaaaaatataggacagcataattgccttatatgttttaagtgaaatgtgccttcatttttatttgccaatagagtatatctttaaatagaaatattatgcttttaaaaatagattatgtacatttcttacttttggaatacacaatctaatatttgccaacttaacttttgtgaagcttttaattgctatattaaaaagtaatttacttttctattacaactttttttttttttttggaggcggagtctcactctgtcgcccaggctggagtgcagtggcgtgatctcagctcactgcaacctctgcctcccgggttcaagcgattctcctgcctcagcctcccgagtagctgggattacaggcacacaccactatgcccggctaatttctgtatttttacagggtttcaccatgttggccaggatggtctccatctcctgaccttgtgatcagcccacctcaacctcccaaagtgctgggattacaggcatgagccaccacgcccggcctcaattacaaaattttaaatagacattatttttaaaagacaaacatttgttgcccattctgttttatttatatatatatgtgtgtctatatatatttatttatatatatatgtgtgtctatatatatatacacacacacacacacacacacacacacacatatatatatatatatgtttttaatgttctctctctctctctctctttaaagggatcctcatccccgaaattcctgtggagtacaatgtcttactcaatgatggaagtgtaacacctctggccttctccgttggtcatcatcaatccacccttctggaaaatttgactccattcacacagtatgagataaggatacaagcatgtcaaaatggtgaaagtctttcagacacttggcctgggcttttatgaaaaagtatttcattaaaaaatttcattaaaaaggaatacattctcagtccaaatataaagactaacgtttcacttcttatttgtagtggactgtttacccagaaaaatcacagtctggcatcgagtaaagcattatgcatttctgcacattaaatcataaatatttaaatatattaaaatggtggttttgcaaagtcttgttttataaggccctttgaaagaaaaacacctagctcacataaaggagtctttggtaatataaaacaaaaatgagtattccaaatatttcatagaaaacatatttaccttggccttatttaaattttatccaggaggaggaagtgagaagttatttaagagttgaattacacccaaatgaatcctatatattttatagtgcttccttgaaccctattcatatatacaaactatcaccttgtgtttcatggcttaggctgtggtcagtgaaattttcatgtatctgtgttgtgttaaggaaaagcctcccccatttcctttatcactccaaacggataagtagctaaatgtaaactgtgatttaggaggggagaacagggaatcaagagagctatacatcattttatttatctcttttaaattaagtataaactttaacagatatggatatgttatatatgtgtatatcatatataacatgatatatgtgtatatcatatataacatatgatatatatgatctcatcatatatgttatataacgtataatactcatttgctaaataaagaaaacatgtaacttaccttagtataaaaaacattttgcttcaccttaaagaaatttatcagactcaatgtgtagtggaaactcctgtattgaatgtccttaggaatttctgtttccaaatagtgctagttctcatggagttggttagaattatgagtctgcaattttgctctgctgaactcatcagaaatggctagtcagtttgtccttttttctctaaaaaatagaccatggcatttttgtttgaggggtattgctttctctgatctgtcttcacctgataaacgtgaaaataattttaaattaatgttttcttgactcaagtacaaagtcaacgtctgcatctccgtgtccctgaaactgtgcaatggaggtacaatatccttcaaatagattgttttattcctgtgtgtttgaataatgttcatgagtttaaaatattggcaaaataaaatattattaaaagcatgcaagatgtgtaggtcacacatacacttgtgaaattcaagtgcattatcactttctggttagaatgactataataaactagagaaacttgagttcagacaagtttccttattattccttatttccagacaatatgccttattgtttatgtctatataaatatgtgactaattaatgggttttccaaaaataattttctatttaaatgttcaaatcccataaaaatttatttaaaacacatgtacaagtatatatgcaaaaggacaggttaaaataattttcatgatatcattacccttctgtatgaatatgtagttcttttccttgcttgaaaaataataaagacctcaattttttttttttcaaggaagttgtggagttagcagtaggatgtttgtcaaaacacctgaagcagccccaatggatcttaattctcctgttcttaaggcactggggtcagcttgcatagagattaagtggatgccacctgaaaaaccaaatggaatcatcatcaactactttatttacaggtaagattggctgttactattatttttagttatttaagaatgcgtactgctccaacacagcagaatcaagagcattttatatttccataagagaatgaatgggaattcatgttgtgtttttttttgttttgttttgtatgtttgtttgtttgtttgtagcacctaccagtgaggactaagactggtgctcaaacttttacaaattaaccaaggaaaaaagccataactgccatataacatttttgattgagatctgtttgaaaactgagaccttatagcccacataggcttatatttagtgatggggcagaacagtcctctaaagcaggggttcctaacccccaggccacagagtccgcggcctgttaggaaccgggccacacagcaggtgagtggctggtgagcaagcattaccaccggagcttcacctcctgtcagattagtggtggcattagatactcacaggagtccaaaccctattgtgaactgcgcatgtgggggatctaggttgtgccttccttatcagaatctaatgcctgatgatctgaggtggaataatttcatcttgaaaccgtacaccctaactgcattgccccagtgtgtagaaaaattgtcttccacaaaaccagtccctggtgccaaaaagtttggggaccactgcttaagcagctcactgaccaagaaaacatagtctttccagagaggaaaccagatacaagacaagaattctaatatttctcattaattattatgtagagattaaaaagttttttctcctcctccaaagatggtgcttttcataagcagaaaaaggggctctcctctccagttttccttctgttttaatgagcctccactccactggttagatggtgttatagcaacttgttccatcatgtgcagaatttattaagtgtacctacctaaaataaagaaaagagacaatagggaagagaggaagagaaagattgaggaaaaagagagacaaagagagattgagagagagagagagaaaataatggaagagagagatacactatgaacattttggtttgaaggatattttgctctctgatctagtcttcaccagatcaacatgaacattgctttaaattaatgtattctttaaataaataatgaatgaggaggagaaggagcaggcaaaggaagagaatgagggagagatggagggagggagagaagaagagaaaaaatagagaaagtgaggggaggtgagtagaaagtacaatgcaaagagccaagggggcaaataacctgtcaactgatggcttgctacttaagacagaaaatacaatcattggtagacatacaggacttgcagattgaaaaacccaatcccattctgaaagcaatgtatttcctttagcgtacaaagcagaacacccttcttctcagatcctcataccccgcacctcttcaacatcctttgttagtgtctctagcagcctcaggccttcccttatttggtcctatgccctggaaacttagtgaaacttacttaggctcctcttataactttagatattgaaatcctttgattcacatcagtcttcagtgatgagctaagggcttatagaaaaaaattacgaaaggagaaagtattattgcatttctggttatgtaaatgacattaccaaaaatgaacaagccaaatttcttctcagcaaacattaatttgaagaataatatttctgattcaaaaacacatgaacacgtaaaaatggttaatgtgaatttccattttacgctaagcacattagtgcaggctctaaaatgtccaccctcttgaaatagttttctttcatccacttaatgctaattgcatgagaaaagcacatcaaattcctattcagaataaagggaaatagagtatctgttatagaccaggacgtggcttcactctgttggttttgtaaataaagctcgtgattacagtgcctattccatggcagctatagagagggaaaacaggaaatataatgcagaaagcccgcttcaatgaaaaatactgtaaattgaatttgacagcatttgatggcatctgattattctaatcacagccaaacaatgatataaagagtaatatgaaacagaatgtgttactgcctagcagactcaaaagcaataaaccttcctccaatgtgacacaatcacttcacaatcataattgtagcctgtttgatacctctgagtacagcagaagggcactgactgacatagatacattttgttttttatttaaagtgaaatgaaaatggcgcactggggctccagatacaatcgttatattcacctacataggcatgaatcacttggcagttatttcaactgaagtttaaatgtgcttagacaacaacaatatcaaatttttcttagatagctgcaaaaaataatcagaaatttgtaaggacagaaatagaatggagacacatagttctttttcattctgagactacatagagccctttatatagttatagccaccagcctgcagtatttctgaggaggttatggcatgtaatttcagcttcatcattggccttctctttcttctatcggcaccaaaggaagtacatttagctcaaaccaaagataggatttggcctatgcagatatttttattaacttgcaggaagcccacttgtaaatctcatttgaaattgtttgccactctcttctcaccaagaccctgaatcattttcttttctgtaactgtcctttattttttaaatatttcctctagatattatcctattaaaaaatatctgacctaataaagacagaagatgtttatgacttcaaaaacaaagcaaaataacctaaatattatcctattaaaaagcgtctgccctattaaagatagaagaatgtttataatttcaaaaacgaaacaaaataacctagtaagaacaaactattaatatgattccctctgcttagtttatctgtttaagctattttgttgactatatataagtcacaaaaaaagatttgctacaaaaagttttgtaaagaatagagaccaacatttaagttagtgttttgcaacctgtttattgactgagtatagacaagactgtcttggacatctgcttcctcctctcaatgagtttggctggtatgataatgattcttcagtattccccctttattttatatctgcaaccttgcaaatggcaaaaatctcatcacttacgtctacaaaatccatcaaacacattaaattgagactttacaaaacatgtaataaaataatctcctcccactaggtgctttaattttaatagaaaccaaatttcatggggtttattattctcatgagctttctctttaaataaataaaaagatttgatcaatgtgcactgagaggcaaaactatatacaaacaccctgtaaatgctgtaaaaatagaaacaaatgatggcacttccttctgagtatttagtaagatttaaaggataaaatctgaaataattttgaagactgtatgatatgaaagggttttcaaagcagataagtgaaaacattttataaaatggataattaagctgattgaattaactaagaaaagacgagcattgaatcaaaggcaaaggaattttgatgtaattcaatttgtattgggtggaaagatggatatagatatgaatatttatatagatagatacagacagaagacagacagacagacatctacctatccatacatgtacatatctactgagagagacacaaagatctatgagacctaagcccttttaccaatgatcttcactacagtgggagatataagacaggctaaataaacaaagaaaagagtaaaatatatagtggaaaaacagaaatatttaccagaaaatttagagaataattctgtgtctagaatattcatggaacacttcatcaagttgatgtcattgagactaggacttataaaataaagatttaatgactatttaaattgtaagagaaatacatttgttagaaaaaatgttttaacagtacagaagattactaaggttattattcattcttatgatttactcatggcatatgtaattttcactaatagaagtaacactattaattttaatatattaacattaatgttttctatttgtattttcttcttcatgaaagaattatattgcccatattgttctgcaattttctttgggcattttatatatatgcccacacacatatacacacctaatttcttttaatgactcatcaatattctgttatatggatgtgtatcatatattatttagccagtaccctgatgatggcaagataggtgattttcaagttttcgttaccacagcaattctctaataaatattcttacggtaagtatacagagaattattcttagtactagaagtactgggtcaattaaaattgttgaggatttgtctttactagaccatatgcatttaaaattgttgaggattcctaagttgtcttccaaatatcatatgtaagaatttctaattctgaaatcttttaatacagggtcagtcttccaaatctgtcagctcaatattttcatttgcacatttttgttgttttaattcaagttttgatgattataagtaagattgttcatttacttaaaatatttatcttctatttgggaggggtatgtataatatattataaattcttagactaattttttctactggattatttcttattgtctatattctttccacattaaagaaaatctccctttcatgatcatattaaaaataacacattaattatttcttccagcacttttatggctctactccttatttctaaatatggaattaatattgttattggaaattagataagaattcattttcttaaaaaatgctaactagtttatcaacattatttcataatccactgatttgaaatgtcactcatacaaaattcctatgtgcatcgggttcattttaggactttgtattctgtttcacttgtggtaaatagggattttaacaagtacagcctgatggtgaagacatgataagtgaataaaatcaatagaataagcaaaatttccaacacataagcataggattcaaggaatggtcaggtttatctggagtcattgctattagtaggggacatttagaagatcagcttaatgatagattttagatctaaggagtttaggctttatattcagaggcaatgtgagctgctgaaggtttagggggtaaatagagaagcaatgtaataaagtggaaagagtgtggcatttgtagtcagaagatatggcttccagggcctggctctaacacttactagttatatgaccttaggcaagtcactgtgttccctaattttccatttttacatgaagtgaagatagtaaatataaaagataattagcctcttggaattctgtaagaattaaataatatgtgtggaattactgttaaatgtgaagcatgataaaaatagaaagttatcctagatatgttgtccaaagccatgttttagaaagacaaatccatctggcagttatagatgtacatttaaagtcaatgaaagaggttcatggttataaaagtagcagcttgcataacagtatgcctggtaggattctgttttcctttaaatatatagtatattttttacatatatatgtatataaaaaaatgtctggaatgttaaacaccaaaatagtgctagcagtgcttatctccaaatattaggctatcagtgattcttttaaatacttctgcttttgttcatctgtgttttcttattaatttttatagtcaatacatcatatggtctagtaaagacaaaataataaatttgtgagcccagatgcaaatctatcatcactgtctccgattttcctatttccttctttgtgtgaatatcaccatcactttctgtaataatcaaagtctgatcaagaaagaggaaccacactacttactttaacagaaggaatttaatataaataattagtaagtagttataaatttgttaactaggtaactaaaagcataaaaagagaactctaagatatcatggaggtggcaactacaggaaacagctagcacctttagaactgagggaacaaaggggagttgttagaattattaaaatgtaaatgcatagaggagggtgcctgtgaagctgggactcagacagttgaagaggggtacctgccactggtgcagttgtatggaggaggaaacatgaaattaagttggttttccaaatgtcggaaaaattgcatgctgcaatcacttgctcccaaggtatttctttattgcaacacaagaacagcctaatacagaaaactggcaccaggagtagcgtgttgctatgaagatacctgaaaatgtggaagtgactttggaaatgggtaacgggcagaggttgaaagagttgggagggctcagaagaagacaggaaggtgagggaaaatttggaacttcttagagactggttaaatggttctcaccaaaatgctgatagaaatatggacagtgaagaccagactaatgaagttggagatgcaaataattgagaactagagtaaaggtcacccttgttatgccctagcaaagaactaggttccattacatccatgccccagggatttgtgaaagtgagaacttaagagtaaaaacctagggtactggtggaagaaatttcaaagcaacaaagcagcattcaagactttgcctggctgtttctaacagcctacaatcagatatgggagcaaaggaatgactcaaagttggaacttttatgtaaaagggaagcagagagcaaaagttcagaaaatttgcagcctggccctgtggtagagagagaattcaagcagactgtggagtgaccactttcaagagagactagcatcactgtaaggtagccaagtgttaatatccaagataatagggaaaaggcctagaaggcatttcagagatcttacaggcagcccctctcaacacaagcccagaggcctaggaggaaagaatggttttgagggccaggcccagagccctgctgccctgtgcaggcttgcgaactgttccccacatcctgactactcttgctgcagctgcagctcgaagggcctcagatacatcacaggtaggtgcttcagggggcgtacaccaaacccttggtagctaccatgtagtgttaagttggcagatgcacagaatgcaagcatgaaggaggcttggcagcttccccctagatttcagagaatgtatgagaaagcctgggtgcccaggcagaaggctgccacaggggtgaagcccttacagagaaactctactagggcagtgcagaaggcaagtgtggtgttggagccaccatacagagtctccatcagggcgctgtctgttggagctgtgggaagggggccacttctctctaggtcccagaaaccatggacagcttgtatcctgaaaaaagccatagggattcaactccaatatatgagagcagccacagggtctgcactctgcaaaaccacagggttgaagctacccaaagccttaggagtcagtgcttgcagcagtgtgccctggagtgggacatggagttaatggagactattttggagctttaaggtttaatgtctgtcctaccaggtctcagacttgtgtgggccctataggccctttctgttagccaatttctcccttttgcaatgagaatgtttacccaatacctatatccacattgtatcttggaagtaaataacttgttttgattttataggcttataggtgaaaggagatgagtctccagatgagattttagacttggtacttgagacttggggcttttgagttaatgctgtaatcagttaaaacttcggggaactattgggaggacatgatttcattttgaaatgtgagaaagagatgagatttgggaggccagtggtggaataatatagtttgtatgtttgtcctctctaaatctcatgctaaaaacagattcccaatgttgcagatggggcctagtgggaggtgattgcataatggggtcagatcccttatgaatggtgtagcaccatgcccttagtgataagtgtgttcttgctcagtttgttcatgatgggagatctggttgtttaaatgtctaggactccacccgccccccgcccccccgccacctctctctcttgctcctgctctctgcacgtgatgcacttgctctttcttcaccttccatcatagttgtaagcttcctgagtctctcataagcagatgccagcatcatgctttctgtacgccctgcaggactgtgagccagttaaatccctattctgtataaattagcttacctcaagtatttttgtagcaatgcaaaaggagcctaatacaaattagaaaaaagaggtagcacatagaaggatatgataactcttatttgagagaaaagcaaggaaaagactttctggaaaaagtgatatggggctagaattttaaaagacgagttgtagttagtctatagaaaaaaggagaggccaggtgtggtggctcacacctgtaatcccagcactttgggaggctgaagagggcagatcacaaggtcaggagatcgagaccatcctggctaacacagtgaaaccccgtctctattaaaaatacaaaaaattagccaggcatggtggcaggcacctgtagtcccagccactcgggaggctgaggcaggagaatggcgtgaacctgggaggcggagcttgcagtgagccgagattgccccactgcactccagcctgggcaacagagcaaaaaaaaaaaaaaaaaaaaaaaaaaaagaaagaaaaaaggagaataagaaagaggattgggagggatattgccagagaattagcagataccaaagccatggaaccgtgaaatataatggaatataagaaactatagtcaagcatttgatgataactagaatataaaatgggactagaaatttcagaaaggtgagtccttttgagaatcagcagattaaggataagcataggccattttacatggtaaatctctaaagaatttttaaaaggactgtcttaaaatttttgaaaggtttgtgatgtctcttccctcaacagccaagtctctactcacaccaaaaacttgacgattcaaccttcacaaatcattttgtaaatcacctgtgtttccatttgtcctctcagcaatctagttcagggtctgcatttattcttacgtaaactgttgagatgacctccttgttcaatgccagatgcacatcatctccatgataacttcattcagatcatgcattacattttacccaatgatttttatgttttaatttttataagaattttcagaggtttgttatactctatgaggttattaactccactttacaaaatgaaatagaaactagaggacacagacaggcaagttcacccaaggtcattgaactaagtggcagagccaggacctccaacctatctcctctgactacagatgtttctgattatctatttaaactcagaatatttgtaatattcttcatggaatggggttggcagtttcataacctcaaaattgttatggtgcattgggttctaggattttgttttaattgcttttgaaaataagcagtgacaattgctggaggggagagaaggagtaaggagctcctaaaagcattgtacattgagaccacagaagtgtgactgcctttaaaaatatatggttcctagtttttatacttatttttgttttcctcttagtgttaggcaacattaaattaactctagttggaaaattacattcctgaagtatctcccaaatgagcctgagcaaagaataaccatttggctattcagagagaactgaaaatgtgatttctctaaacacaggctactcaggaggaaacacttccagttaaatgaacaggtgatgcttaaatcttaaataattaggaataattgtggtctactcaaccacttctgctctaaatgtattcagacataaagagagactctgttttttagcagtgcagatgggacatgtacttctccacgatattaatttttcaaggattcaatagcgataagaaatacttaaccaggctgcaccttttaattcttttggtgaataaacttgaggccaacataatactcaatcttttaaatagtatatgtatttaaaaccccacttttaggcaaattttgttaagaatgtcggctttatagaaaccatgactacatctcaatttgggaattcgtgagagtttaataaaaattaattgaattgtcatggaaaggctgaagctagacaaaatagaaaatgttacttccccatagaccatcataggtttgtttgctgtattgtgttcctagcaaacaactttttaaaaatcactgagaagagtccttggctatgagccctgcagttctcattagaatggatctctcccaatgacacacctggtacctgatatctgtagcaagtacaaaggccaaaccctgcaaaccttcactgagtgcagaatctggttcacgcatggtagtgagcaataatgaggtgggctgccgaaccataattgcaggtgactgagaggtgtctatgaagcctctatagcttccagcatgaagcttgtcattgctcatacttaggtcatcgtgatttatcaacttaaggatcatcagattcccaaagccaaagattttacatattctgcctttttgtgaaaggtaactgtcattcactttgtcttaataaccctttacattttgatggagctggttaatctgatatggcagcatgtgaatttttcagcatctgaagagtgtgttaattaaatacttctaacagcctggaaaatattactgtattcatcactctcttctcaactagagagagagctgaaagaggagggtcaatgtcttggttacattctctcccaacctggaatactgccctgataggaaataagagctgatggagaagaggcaaagatgcagggaagtaatgggattccataacttttagcctttcacttgaaaaacatgattgaacacttactgggctcagatgctgggaatatagagatatgccaaccacagttcctccagaactttgctttccatcaaacctgcatcatgtttttacatctggatgagaaaagaactgttccaaatgaagtatcagatatatagggccgtctcaacaactcaccattccatttctcttacttctatatttaatgctatatatatttagtaccaaaagagtatgcatttggccctagtttccctatcaacaaaatctaaagatgagcctaaacaattccatcctcagacagttgaaagaattttggggtcatactctgcattttaccaggttttggggaagacatctaaaaggaatttgacttttgtcctttaaaaatctctaaagcaagccagacatggtggctcatgcctgtaatcccagcactttggaaggccaaggccagaggcttgcttggggaagaccagcctgggcaacatggcaagacctcatctctacaaaaaaattttaaaagttagccaggcctagtagcacacatctgtagtcctagctactcaggagactgaggcaggaggatttcttgagtccaggagtttgaggctgcagttagccatgattgcatcaatgcactccagcctgagtgacagagtgagacccagtctcaaaataaataaataaaacaaaaaaactctaaaacaaattcctattatattacttatcatgttattttcattaatctgcacatagctccatcttctctactcagctacctattcctttaggtaaggggtgtgttcatctttttacccttgtttctaatacaatgatgggcatataacagtgcttaataaagttgttgatgtataagtacaataaatgtagaaaaaacagtggtcttgatgtataagaaaagattgtccatactttgagaggttatggtttaaattatagaagagaaaattcaaatgaagagaaattaagtggcatctaagaagtgaatttaaaatactttgtaaacatcctgggaacaattgcaaaagagcattgtgctgcatgagagaaaataggaactgtggacttcccttcatagttcttcatcatccagtatgccaacctgggctttttcacacagtaattttatggtcctaagagcagcaaaaggatcatcctcaatgtgcaaacacttttgaagtctctgcaatcatcatatttgctactgtcccatgagccaaaaaagtcatatagccaagctcagagtgagtttacgagcatactcgcaaaaggcctggatacaggaagacaaacacattgggaccctagctgcaatccatttatcatagaagggtaaggattcccaataatagcttctactaattccatatcctgtggttccagttgtacaaaaaataaaaccccgatataactgcatgcatacatgcacacacacacagacacatacacacagatctggaaaatatataaaaatgcattaataatgtttaatatatgcttctgtatttttaaaagattttaaatatgtttgttttcttgtattgcatatgtatcttgttattcagcaaaaacatctggaagataataaaatgtgattttggatgaggtttcaccttttgtgctttttatatttcttctgtgttttccatgttttctacaaagcatatgcactcttttataatcagtcaaatacgtgtgtgtgtgtgtgtgtgtgtgtcaactacactttaaaaatgatatggagttaggccactggagtacttctccatctggtttttctttactatgacaccaggaagaaacagctgaaaagttaagttgataacaaattctaaaaaaaatgtttttactccatctacaaactttgttttgaagtgtgcagctgtcactggttgcctgcttggtttcctttcagacgccctgctggcattgaagaggagtctgttttatttgtctggtcagaaggagcccttgaatttatggatgaaggagacaccctgaggcctttcacactctacgaatatcgggtcagagcctgtaactccaagggttcagtggagagtctgtggtcattaacacaaactctggaagctccacctcaagattttccagctccttgggctcaagccacgagtgctcattcagttctgttgaattggacaaagccagaatctcccaatggcattatctcccattaccgtgtggtctaccaggagagacccgacgatcctacatttaacagccctaccgtgcatgctttcacagtgaaggtaagaccctttagaaaagtaacagacatgcagattatctggtgaatacgttgaaattaattttcttgtccaacttctcatttttcttcacttagggcttaaatatatgaaaatctttcacttgtgaaaagttgcaatgtagtcacggggataagatactgaactgagtatgaggagtattggagaccagtttgtagaccacgactaattttgattacctcaaaaccaataaataaattttatttattcataaaattgcctgatttccattttccatatttactaagtgggaatattttttttttgagacaggctctcattctgtcacccaaactggagtggagtggcgtggtctcagctcaccacagcttctgcctcctaggtttaagcaattctcctgcctcagcctcctgagtagctgggattacaggtgcccaccactgcccaactaatttttgtatttttaatagagaggggttttcaccatgttggccaggctagtctcgaactcctgacctcaagtgatctgcctgcctcagcctcccaaagttctgggattacaggcgtaagccactgcgcctggcctaaatggaaataatttagtcttgatttccattttccatgtctactaaatgggaataatgtaatgctttcctccatacctcatagagatgaggttcagatgaaattagacagaatatttaattttctacttccccaacaagctagtataatatatagctatatatatatgtatatgtatatatgtatgtgtatacatgtttgtgtatatatgtatttgtatatatgtgtgtatgtatgtgtgtgtatatatgtatttatgtatatatttaaatatacacacacacacatacacaaagttgcatacactatggcttactggtgatttttttcagggatggcttcctctggcccatagaacgacttaattcagttcacctgagcacttagtagctcctgagtgctttctttatgtccagcataacctcatggtctatggaatatacagaaacaggatggtccttgtcacagggagtgttccgttttataatattgcagagatgagaattgcacataaggggaaaagaatgagaagcagttgagtacagcctataatgtccactacactgagacttagatcccgaactccactatctactagctttaaaccacagtacaagagagagtaacatcatataccaagtgttaggcaagaaatgctctgggagatcaactctcaaactgaagatgcttcatggataagattaaattttgtggtcttgggagtgaaatacaaatatgtgccaagaccttattaaatatggaaaaccctcaataagaacaaataaacagacaaactaaagcatttataaaaaaaccaaaaaactatgtttctatgctttaaatcctggaaggccaatttacatgaaggttatcttatggaggataacatttatcaaaatatttaaattacagtgagcaaatatattttcattaaactccagaagagcccttttaaattaatagtttaaagtacaatgttttcccactgtcctcatgtttaattttctcatatgactaaaaaataagcaatatgtaaatgaaaggataattgttttatcttcatttttatctgtttcagaattagtactatatttttattagatagtaaattatgtactagagtcttttatattatgtcttctagttcctatatgataagcattagaagcagtgttcttaagtgtaaaagatactttttagtggatatgtgatccaggaggaagttcgttacttcccaccatatccttcaaactcatgttctaaactttcacccttaaagtaaaacgtttatgagtatactgaaacacccttgttaatagctttctgaatgaggcaccttaatttaaatatgtttttattgaaggcatcaggattataatgattaaacctctgatcttttaaaatacaactttcaggggtaggagcctaataatcatttagtctcacgaaacagttctattggaattcccttgtggaataaccctgtaagtcatcccttcataaccagcttcattttaaaacacaagatttaaagtatatgatgaatccatgaactctgttctttatttaatcttctaggctctatttttatcacactaaaaagcttctgaaaagaggcaagtgtatggccccaagctttaagcggcacagggctctttgcacatgggccctccctgatgtggctttcattttgacagtccagtactggtgtgcttttctatttttccaaagattttttttcttgcaatgtcgaatagattagccagaataattttaaaaacaatacttctgtgtcctatttttgaatgtgtatgtgtgtattcaaagtggcctcccaaaacctaaatctttggctcttagaatttcaagagaaggcttcattagatacaccaagaaaggtcccacctgatcttttcaagcaaacaaggacatcttccacaaagcaatctaggcaagtgttcagaccttctggccactggaccacgttttcagggcatcagggcaactatgactctttatgatctgacacctttgaaggaagtcatcaggaaaatgaactagtgtttttgtgtttcacttattcccacagtccctgtgtaggagattgtgttcaatatttttgtttaaaagatatctaggccagacgcagtggctcatgcctgtgatcccagcactttgggaagctgaggcgggcagatcacaaggtcaggagttccagaccagcctggccaacatggtgaaaccttgtctgtactaaaaacactatttttagtatttttactatttgagaggctgaggcaggagaattgcttgaacccaggaggccacggttgcagtgagccaagatcatgccaccacactccaacctgggcaacagagcaagactccgtctcaaaaaaaagtaaaggaagttctattacttatccagggttctatactcctcaccgtcacagaagaatgtttcttttatctcagacaaatcctgcctcctataatttaagtctatctccctttgttcagagcagcatgacttctccataatagcacaaaggggcttcagggtccaacaaattattgacaattcaatctgatttggcaaataaccattgagtactatattcaatatgtcaatattgaataccaaacttaactatgttgttgaagtctactgtgagacttggcccttgagcagagcagagactgtgaggaagaatgagtgattcgttctgaggcacaggctattactgttgggcattttgggtttttaagcttcttgcagctgcgtttctgctgcccatgtttagaagaccccatttcatttttatttttgtataaacttaatgggtccaagtgaagttttgttacctggatatattgtgaagcagtgaaatctgggcttttagtgtaaccgtcgcacaaataatgtacatcgtacccatcaggtcatttctcatccctcaccctgctccctccctccctcccacccttccgagtctccagtgtctattattccacaccctatgtccacatgtatatattatgtagtcctacttataagtgagaacgtgcggtatttgactgtctgtgtctgagttacttcatgaggataatggcctctagttccatccatgttgctgcaaaagacatgatttcattcttttttatggctgagtagtattctacagtgtgtgtgtttgtgtgtgtgtgtgtgtgtgtgtgtgtgtttcacattctatatatatccatatatataattacattctatggtgtgtaaaattattcctatttagtaaatatggaaagtggaaatggaaatcaggagatatatagatatagatatagatgatatagatatagatatagatatagatatcacattctgtttatgcaatcatccattgatgaacacttaggttgattcaatatctttgctattgtgaatagtgccgtaatacacatacgaatgcaggtatcttttttaatataatgatttattttcctttgggtagatgcccagtagtgagactgctggattgaacggtaattctacttttagttctttgagaaatctctatattgttgtatattgagaaatctctataggggttgtagaagactccattttaaatcgcatcccaagtacttccctagatctacttactgtttatctaatttctgcaccaggtaaacaactttactgtcttctttcctttctgtgcctgctgtaggaaatttttcaagtttttgtttattggccactctggctaaaattcttcagggcaaaggaactacagaaccttctccattaatgaggcacagagtccatccccacaactgtaggattgcagttcagtccacaaactcgcaagaggtactgctaatgcattagtcccttgtttattaagatctcatctctgcccaaggggccatcaataaattgcccatgttgtggtgccatcactagcttgccccaaggtccccccagagttgtttatagacaggtggatgttgctgagagagccacataaaacaggtgcaatggaggcatgaattctgcttgtggtggcagtggatggagaactggcagtgggggccctccgtgggggtgagaagcgtatgtgttggcaggaacagcagcagcggcagcagcagcagaggcagcaggagcagagaaatggaaagagtgtgggttttaatgcatcactagctgctctcccaacctcatgaaaagtttcacctccctactcatctctatgtaggtctttctaaggaagaaagagggagatcaagattcttggggtctctttagaccaataccttccattattgaaaacagctttaattagaaggccttaaactcccttcccaattagctctgtgatgaattgtgcggtgtcaggaaagaaactgtatttagccttgcttggcatgcaggagttccatggtggtatttacagggaacactcctggcaaggttggcgatattgctaccaccatttgggtttgtttgctttttctcactggcatctgccattgtgctggcagaaataaatctgataatttgggattttaaagaaaaaggtggtttacctattatctgtgccctaactatatccttgcttgttccacggggttataaaacgtcaagcccagatcatgcatttgcccagtatcctaaaagataaatggtacttcactctgtgtagaatcaagcataaggtgctgagaaataagcaaattatatgggtcactaaaaattggcttccaatctgggaataaaatccagaattactaactctagtttctagattctagttgccaggcttcctttcccaatgtcaaggaggaggtagtcaaaatttcctcaagggtttgtttcctatatctttaccattaagtagatatgtggcaaaaataataacaataataataaaatagatatttcacaattgccatgttatgaagagtgtgtgagtaaattgataaatttatttttaatcccattttcattttggcttagataacataaaatattactgctctttacatatgatcttaaattagtttcaactctttttaatttgatgattcttagccttttctccccagacacatttattagacaacagaaatactctgggagatgtagctttctaaaaggactcctttggtgactatctttctaatgtgaagaaaaattcagtaataaaaataattatcatatttcctgggtcggttctataaactgagattttcacattttataataagaaataactgtgtcattcttctatataaaagatagaaaacatgggtgagtaaatatcacacaaaacaatgaatatttgtcggcctaaccctttttttttttttttttaaagagacagggtcttgctctgtcacacaggctgcagtgcagtggcaccatcatagctcactgcagccttgatgtcctgcactgaagtgatcctccctcctcagcctcccaagtagctgggactataggtgcatgccaccatgcccagctaattttttaaattttttgtagagattgtgtctcactaaattgccccagctggtctcaaattcccggcctcaagagatcctcccgctgcggcgtcccaaagtgttggaattacaggcttgagccactgaccatggcaaaactttttagttgtgatgatattttagctttaatatcaacttttcatttacttgccttacataatctttaacccttttgtctaatttgggctagacaaattagactttcagacaaatatgtatttgtctgaaagtcataaatacatataaagaatctaccttttgctcaacattattggggatgaaaaccatgtaagtcttttgaaatttatgtaattacatctttgaaagagccatatttttctccaaccactttatcccagcaagctccatcaggattcccttgctcacccatcagtaacatctaaggcaggtcccatgattttccagtcacttttcagtggcaaggatcaacgcaactggtgattaagactcattccaagtgttttttaaaaacttcagtctagactgggggcgatggctcatgcctgtaatctcagcactttgggaggccgaggtgggtggattacctgaggtcaggcgttcgagaccagcctggccaacgtggtgaaatcctgtctctagtaaaaatacaaaaattagccaagcatggtggctggtgcctgtaattccagccactctggaggctgaggcaggggaatttcttggacccgggaggtggaggctgcagagagccgagattgcaccattgcattccagcctgggtgacagggcaagaacctgtctcaaaaaacaacaacaacaacaacaaaaactccagtctaaattaaaacctgatatgtgcttaaggatctgcagtggggaaagagggcatggtcattttcctctttcttcagttccctcttctcttatttatttccccaggatcatggcatgaaaagaaagaattagacaaaaaggaacagagctttactcaataatattgctctaattaatcttctattaattttgagggggcagatgcctcatgggattttctctgtgggttatataggggtccccataggaaattccatgcctcatagtcctctgatgcaggcaatacactctctggctaatttcttactatttgttattgtccaagaggtccaccctacaacctttttttgcctctgggggcccttctcccaagcaggcagccaatatcaagtcctatcacgttgacaaaactcattcctttcttggcacccactaggattgcagaaaactttggtttcaccaaataatgaaggtacagcttgtccagtactatattctctgcttgacctatcatgctggatgaaacctagccagtctcctaactttggaattcattgactaagacacaggtattagcttctgtgctagcctattatcccaaaactatgggatcacttaaggatttcagaagacccttttgactctagtcattgcatcaaaattgtcctatgaatttcatcagtgcagtaggaagcctcttgccaagaccagactgttcatctcacttttctggcaacactcccaatttcttcaagagcttctcttggatattccttgcatgccttgaaaggggagtgtggagaaatcccattccctccctgaagtgggaaagatataaccaaagcctctttcttctccactgaatccccttctttaattttttttatgaacttggatcttctcatataggttgtctacatagatcttcataggaagatggatcttgaagtctgttttttccataagtcatgcagtgatatgtctagctgttccagtagagttacttaccacctatttttctaaatcatactcattattctccaatacagttctgtttcacatcctattatataactaaatggccctatcatctttctagttgcacaagccagatcatttttgagtcctctctcttccttacttccatatcaattcttcactaagtgctattgattctatttccaaaccatatcttaaatccttccacttgaagacaacattaggatcttcacacatgttaatccctcctcctggaatgatggctcattctcctataattcatctgtcctcattcttactcatcaagtctgaactaaaatgttgcttatctcatagggctgctgcaatgactaataaattaatgtatatgcaaagtactgtaaagggcaatataaatagactataaacctttagcagtccttctttttgaaaaaacagagactggaataaattagcaaatgtagataaggttctggtttgtctaggcaactgtactaatttggtcatgagtgaaaaaccttatgttttatacattttaagtgttcctcaccttgcaataaaattctgagcttgcaaatttacatgtttcctgataccacattgttaatttccctgtaattttccaaatactggattaggttctatttcctttctaaactgcctgaagcaagaacatgctttttttttttttttttttttgtctcctgaggtttattacggtcttatccctggcccccctgccccaacaacatcacatacctgccagtctaagagccctcctcaggagatttccaccctatatgtagttctctttacctgacatgacactcttaggaccctaccctttcccttagatctgggattatatcagcagaacatgatgaggtattttagtcacacacacacacagacacacactctcacacttctcaaatcatacaaatggattctgccaaattggcatctacctacttcccctatgccaaatagtagtttatcagtacatgagggacagttagttggtggggagactgtttgacctgtgagtcaagtatgttgctattttctggcctttaaccaacttacaaggaaaccctctttagacacctaagactcccgtggagccttgtcaaaaatgtctgtgaaagtaaaatgaactagtccacatactaacaggcccaggccataaattcagaatatatgccatttagcagagacagcaagctgtaaatggcagtgaagggcagaagttaattgaactactctgctcttgtcacagatggaaagtagccactacctgagacaagatggctgccccgaagtaccctattacagccaagagatcatatccttagctctgcaagggcttatgggtgagggggaaatcatacacagatgaccaatttttttatggttcacagccgataaaagtgaaattcagcagctgttcaggacaagtgaccactgtaacagctgtaatataacctactaaatagagagggaattgcattagagcaagaggttagctgtgatcatcggcaggtgagtgctttattgaagttgaaagaccattaacattgatagagtaattatttcaacttgaaagtaattaccttgatgggtgataacttctctagtgttcccagatttgattgggccaaacaattgtgagctcctgaagcctagaaaaatattacaacaatactgtgatttttaaattactgaaaccactgttggaatattctaattatgccgaacagtgaaaagattttgccttacacaagctagtgacctctcatgtagagagagacatttgctttttaatccaaatgcaatgacccacacccaccacctgtgaatacatatgtgatgggtttgcaaatgaatctttttatctcaatataatttttaaggtgaaacatcttgttagtgctgtgcctgggtaatagtaagctagaactgctgacatttttgatcatatctatggacttgaagtctccagaatggcaactatcttctatctttgtcacagagggtttaaatttgtataaattaaatattttgataatgactacacataaattagaatttctggatgccacgtactttggatcccaaatttcagatattatctagttacataatcagttgtttaaataactttctcgcctgatgttatgcaactccactacaaacactccattgtcagggtattttccgtttacctacactggacatcagcaaacaaaattaaagttgaaaacctgggctattgcttctctgtagtctcatgaatatatgaaaattgcaagttatttgcaattgagggccaagacacatcaaatctaattcagtgatcaagaccaagaaatacagggctcttccattaatcagtttttcaccatatttctcttttgagaatctacttggtccagaagctataacagatacaaacaaacgagaaatagtcttttctctctgaaactcgtcgtgtatttggagaaacaataagaaaagagacaaaatacaatgtaataagcaatcattttgtcatgcatggtattgattgtacttataaatagttacaagaacctaggaagactctagcccatactcctgaatccaaacccagcactcattctatggaaccacaaaccattgacagaaaaaacacaggcatcatgattcttagtcatgttgtcagaaaagatgaatgtgacatcaccttaaagttcctggatgattccgtagacctttctatcatcttggcagggtttgatcagatgatcagccaatgaatgactatctttttggcggcacttcccaggagttttttctaatcaaaatctcagactctcctagggacaaaacaggtttctacttgttgtctaagagccaataaggaatgttttaccaagcagttaatgggtttctttcatctctccatctcggctctgaattcccctccatagacaaagtctttgggtctctgtttcagaaattaccgtagggtagaaatctctgccaagccagaagacatttgcccactggaaagtaatgtaactggcttgaatttggtaaaagagtgaaggtttgagacaaaaacataccacttgggaaagtgataaaaatttatgaattgaattgtaaatcttgccattaagccaaccaaagagtaacaaaatctgaccaatctgacagcacatcagagttcttagcacagcaggctcaccatgtgtcatatacagccaggctaaagattgtattaaggacccccttaggtactctgaatttaaaataagtgtaataactcatttttaaacattttatatgatacttgaattattaaatattcacattacaaaatcagagaattttaatccattcaaaagggtgggttgtctaacactgaaagataatggtcatgtctagatagtaaaattacagtatatttttaacggatgtacatgttactttttgacaagacacaagtagtgaattttatcgtacaaattcctattgggtgattatgatacagagttttatttttgctaaagcaattactaatgtcatggctggatacctgtgcccattagtggctggttctgtgtttttttaggatggttattgatctcttgctgagctgagattcaggttttatgccagatagcttgattaatgggttggtttctataagtggactgaatggggatagaaagcaggggcagcctgctctgccaaccccaaatccgtcaagacgcatagctcattatgaaacagttatcaaggatacatgaaaaattaattgggctcagtttgattctgaaaagaatcggctttctacttggcgggcccccccgccccccttccactctttccagatgttctgcaccagcccctagagaaacagcaaagggagacgtattaatacattgtattgattagatcaagacccctgacagttatttgtagagataccatctggctgctgttcgaattccttcaccaaaaacaggacgtgacatgttattaatctcaactctctaagtatagacagttgccttttctgctaaaccgcattttaccattccgtaggagatggaggaagacctgaagggtgcagaaattaaggttattacacaaattgagccatatggtccaaatatttcagcaagaaaattgccaggcaataaaaattgctcctgccttcctaatggtgtaaattacagtttaaccatggctctaatgatgtccttctgccgcgcttaactactgttacatgaaggacattgttttaaaaatataaaaaacaagtaaatgccagcagcgtgttttacaatctgttagtgtgtcattaagaacactgtcagaattacataaacataatggcaggcaacccagcatacaaaggaactcgtatggaaatagaaagtgtcttgaaaactctcttcattatctctgaaatgtcaagagcactgtcccctctggaagttttctagggagaaaagacctgtccatctagtgctttattctaattctcatgtgtgtcccaacagcagtgttttctaaatcaagtgtcacaacccatagtgagactaagtacacatctggtaccacaaccctgtccatatacaaaaaatgaagcagacaaggtgaggagacagctaatgaattctaaacaaaatgatagacgttgaccttttgaagtatttttgtttttggggaaaacagttaagactccactatcttccttgatgatgacatcaacaattaaaagtataatttctatcctcagcaaactaacctggcaacagaaaaccaaataccacatgttctcacttgtaagtgggagctgaacaatgagaacacatggacacagggaggggaacaacccacactggggcctattaggggggtgaggggaggaagagcatcaggataagtagctaatgcatgtggggcttaatacctaggtgatgggttaataggtgcagcaaaccaccatggcacacgtttacctatgtaacaaacctgcacatcctgcacgtgtatcccggaactttaaattaaattttaaaagtataatttctgtcatccctatttggggcatgatattaagaggaagcttacttaagataatcaaaaatctttgggaattacaataaagaccattaatatttgagtaagacttgaacccttcaaatatttttagacctattacaccaaaaacacctcggcacttaaaaattccatataggtcatattgatgttttattctctaaaactgcacaatcctccaagctttttggtcttctaagatgttataaacacagtttgttaaaggaaaagtccagataaacgtttgtagaaaaatttgaagggaaaactacttttaattcccagaggagagttgccttatctttaagccctttttccttctccatttccccaaagggagaaagaccaggatataaattgccctttaaactaaaaaagaaaaaagagagggaaaaaacctaggaaaccaaaaaattattctttttgcatgcatgcattaatattaatgagaacccattaagttattatttcctcatggcacaaatggcaaggctagcaatctattgactagagcatcttctgcctggaaagctcttacccaggtgtccccatggttggctcccacactttcttctggtcttaagtgaaaagttactaccactaaagccttacctggcctactcagctacaatttcactccactctccctcacacacactttctattcctcttctgtctttatttttctctttaatatttagcttttatttctggtttcttgctaacctgtaatcatatttcagaaattgtttttcaaatgctttgttatgcttcttatttcacctaaaaggaaatctgtatgttcacagctaaatcaaactgagaaagcatcatttatatgttccaatttcaatttataagctgacaacttccacataaaacatattatgggcactttacacatgccatcttatttcacctcaataaccaatctgtggagtattattacctaaatttattaatgaggaaatggaaactcagagaggttaagtagcatacccaaggtcacacagctagctgcagagtttggatttgattgcagctctctcagcttctaaagccttttctttctgttatccagtattgcttcttgagtttcagcctagtggaacaagatgttatttatgaaaagctaaacatcaatgaaagccacaaattatagttcaataggacaaagagatgacacagagcttgatatgattcattgcctagtataaatatagaaaacaattgataaaagtttcaaagaattaaaagatcacttggactggaaaagttcagagaaggcttttgggagaggtctgtgctttgaacaatgggtgaaattcaaatagaagaaaagtagaacagatattaccttattcaggcaaagaaacagaagcctggttttgaaacatctgatggcaagtctctgcttcaggaggtcacatggggaatatttttccaatatgcccccattaattgggctgatattaaaacaactgatttaaaaaaaaaatcaaaatactcccaagagatgcctagcaaagctattgagtgaggtggttagcagcatgggtctggggtcaggaaacatagattagagactggctttggcttttttactcattgtatgccttcaggaggttatgcctaatagtgcctcccgcagagaggcagcacctcttagagtcgcaggaactgagacggcactcagtaaatagtggtgagtaagattcaaaataggttttcagagaagaaatcagcacatgaagatatcatggtgtcatagtgtgttgacagggtcctgtctggagatactagtccagaatttcaaaaaaaggaaaagttttcttctggccgggcgctgtggctcatgcctgtaatcccagcactttgggaagccgaggtgggcagatcacctgaggtcgggagtttgagatcagcctggccaacatggcaaaaccccatctctactaaaaatacacaaattagccgggcatggtggtgggcacctgtaatcccagcaacttgggaggctgaggcagggagaattgcttgaacccaggaggtggaggttgcagtgagccgagatctgccactgcactccagcctgggtgacagagcaagactccaaaaaaaaataaaagaaagaacaaaagaaaagaaagacaggaaggaaggaaggaaaatttattatattttcttgtttcccctgcattccctaatacccctttcccaaaagtatggatttcttcactaaatatgttagtagcagaatggtcttgtggcagttgacccaagactccaggtagagcagtggggaaagaaaagacaaggccagccaagaggccagccaagaggacaagctcctccaaaggttgacttgagatattaaactcattgaaaaagttactcaacatccacagtgttctggtggtacctcacttagtcctggacaatgaatcacagcccaagcttcatcattgaattggtgacactgccgagggccaactcaccagccttcaaaaacgacagtgctgctgacagcaaaggcgatgaggacacacatgtgcatccacccttgagatgctaaaagaggcaggaaagaacttgagggaaagaacaaatcactcttctgagattgtcctataaactttataccaggacctatgctatcatcctccttacctaatcatgtttaatatctgatttataagaatctaaatgtgtacctaaaagtagctttctaaatattactgggccacattaaactgtgaccaattttcttccttcctggcctaccacattttagaaatatgatagcatatttgggttgggagtcgctaaaggcctcaagagagtccatctctttgtcctttctgactaggaagacctggtcatcacgccacaagccttggtgtctcgtttttaacagagcaataattatttattagtggaatatatgcttattatatccagaaattaaagttgttaggggacatttgtgtatccaggtccctgtggctgggtgatcgcatctgttagaaataaatcactttaagaaaattatattagccccacagacagtcaagaatggagcaaagggagggaagtgtgaatagggtgaggaagcttgattttaaatcttgtgaaatagagtgtggtcaatatgttgtcagcacattacagtgtgcagacatcaactccatttttcccctctttgaacctcaggtggccaattaacagtatatgctatttattcattacaaaacaggcaggacaaattgaatggttagaatgactaataagaattcttagcaaggagtaaaataaaaaatgatacataaggagagaccccccagaaaaactttagggatttccagaaaaaaaagtcttgaggagttttcctgttaaatgtatctagaatttctactgacatgaggaaattaaaatggaaagattctctttgaatacattttcttcctaaaatatgttctcttcaattccctcatttgtatttccttagagtttcattccttcctaaagcagaaagacagttttaaattacttctagcaattataagtatcattagggtgttttgatgctgcatttttacaacaagcactgtgcttgccttccttatttgtctctcagttcaactccaagtcgcaacacaggaaatgaaaaccttgtaaattgacttgatcttatgaatactcacttttgcaaatatgaaagaacttaagaagggattataaaatactccttatctatataattaaaattcagttgaaatatatgaattcaatattttaattcatgcatttcattttgcgggcattcaaagattatatgcttctatatgtctgccattgatttctgtaaataacattatctctcttattgcaaaacgtacatcagaagaagttggaagaaagcgagggcttgagggatgttaaactgaagcagcagtgacttactatgcagtgttagtagattgcttgccttgaggatctagaagccgatagaagaaatggagccagcaaataagaaatttcttatttcttattccagaaataagaaattctgaacttttaccttcaaagatccaaaaagaacatgctaatgttcttttttttctaacttttgagtaatttagtcattctcgttcagaaaattaagggtctacatctggcagcaactgaaataaatggctcaattgagtacacacttgaatgtcaaatatatcactttaaaagtcaatatttgtttcagctgtaaatgtttctgaacggaaatgatgcttttagtgtctgtagtctaaggagtagttttatttttgaaccctcaaattgagtgctccacctagagccgtaggaccctttcctttccatgaggagagcgccctctactgggtatgtttacttaccacgcatgactgttaagaccctgagctaaacgtatgagcagttgagatgtacataagaaagagtttttggaaaatctttgcccctgcttgtactagaatgattgcaagtgtggaagtagccatagttcactgtagttttctttttactgctgtattattgcaccctgttgggggatacatctgagcatttcatgtgtcctacttttaaaatgcccagatggtggctacgtgctttggtttgaattgggcagccctcatctttcatgctctgtagtctgcctcgttatcagagagacatgagacaaggaaaattcttccatttttcagctcctcttcatctgtttctagtcacccacagtgaatgatgcacttgcacaattgttaaaatgacagtcactgtgataactgaacatcacttccctgggatggggagttccctatgtacccatagcttcttgattccttcccaatacagcacctttttcagtgtaactgatcacttgcaatcttgtaagtaacacagcagtgagaggcagtgtaaatattttataccttgccccaatcacttgtatgtgcatcggtcttcttcactctagcctttaagcttaacagagattttaaatcaaatcattcaaccctagaaatagtcaaaagaattaataaaataaatgaaacagtgtaactggttaaaatagccccagtgcacaatacaggtttagtatgattttgtgacatacacattttatagggcttttgtctccaactacattcttcaaagagccatctgggcaatgaccataggtatcatttttaccaataatagtcagcacttcccactgggaaattagtcaagggaatgagtttttttttttttttttttttttttacaaattatcttcaagcatctatcttccaaaaagtattactggactttgtccattacaaggcaacaacctaagtgagttacttgtgctcttattttagaactttattcatcagatcattgtgatcaaactcaatttcattttcaaagaggaaaaagattttgctctgtttttcttcttaataataggtttgctgaaggaagaacattaatacaggtcagcgatctccaaactttttagaatattcacttgtagaaataataatttggggagcacacatctgcataatatgtatatttacttatttgtaaattataaaatatgtactagttaaatagtatcatttacactatagaaatagacatttttaaaggagtggaaatagataaaattatcaagaaaatattttattatgagcaactactatcaataatacctcaaggcacaatacacactgaaagattaatcattaatgatgctgaatgtcaatctctttcctgagtgttcttgatcatttcaaaattttgttgacacttctgatcaaatacaattggaccattcatgtttatacctcatgctgtggttgataaggagcttgaaggaaggagaatcagactggccatttatttgttcttcatttatgtttgtattgttagtgttatatttgaatcataaatttgaattctaggaattttgaaagccattcatgtttccaaagttagtatacttaaaaccagataatataatccataaacccccttagcatagaaccataaactacaatatgtcacttgacacaaggggtccagaaccccggggacgcagaccagtactggtctgtggcctgttgggaaccaagccacacagcaggaggtaagtggagggtgagcctcaccacctgagctccacctcttgctgtgctccacctgaggagtggagcacagatctgctccacagatcagctgtggcaattgcttctcacatagcaaaccctattatgaactgcgcacgcaagggatctaagttgtgtgctccttatgagaatctaactaatacctgatgatctgaggtggaacagtttcatcctaaaaccatccccacctcccccttccatggaaaaattgtcttccatgaaacggatccctggtgcccaaaaggttggggatcactgctttgcactaaaagcaaacaaatagatgaatattgttagctcctcgctgtaaaactcccattcttccttttccaaggacagatacagaacttaattgattcattcattcactcatccagtcagtatgtgtatgcatctaatatatgccaactgggtatatgacagtgaataaaccagacaaaaatgcttccctcttgaagctcttactctagtggggagataaagacaataaacaagataaggaaataaaatatatacataccatacataagctaagggcaatggaggaaaataaagcagattccagagtctccattataaaaaatacaacttttgcaaattggtctttagttcttattgagtttaaaaggatgtttcccttccacatccttcttcccactgtcttctgggatttttgcttcagatatgatggtcaaattgcttattataaattcccttctaagattctatgagttttaaatttgttttaattgttcacatgttgcattgaatgatgcaattgtactcttctagcacacagagctagtaaatttcctatatattgatatttaaagcctgtccttttatggagtattttgtgaccacctaaacccatgatgatttcttgtgtatacaccttcagtgcttggttcccatgtatttctctagtggtttcagaaaggtgagttttacattcctaatggattacagttcctaaaatccagtatgttcatactttctacttttattcctttccatttagtgcctagaaccatgccagaaaaagacataatttgactgtggatttaaccctcagatcacaaaccaatctcagagctttatttttttgctgagagttttaaataaactataaagtcaaatttaaacaattatcctttggaatcaacagaaccccacatttccttagctttccttagctgttcctattcccaaggatcacattcagagcactcttcttgagtgacagtgatgtgccaggtacttcacagaggtcatctgttttaattgtcacaaaagcccaagagaaagatactaactgttagaaatctagctcagaaaaagtagatgatttacctaaggtacatctagtgtgagtgacaatcagaacttaaactcaattcttctaagttgactgctgttttgattaaagcgcctgggctctcagaagtggactcttcctgggtgttagtcacaagggcttctcagaatttttctcctacatatgagacagcagatcatttctgcctctctgctaagataagccaagcaaaataatagattgtagaacaattaataatgcattcaaaatgccaaactcagcacactttctatcctttgtgaaaaattttgttcccattttgtccaaatgtctaataaaaatgattgtggaaaaataaaaacaatctttgatctgcctaaatgaaaataagaaccacaacttctagctctcagaacaaatcaaagttgtttttatttttaattaagtatgctaagcttaagtacattttctcttaaggtgtaattactaaaccatgatgatttctttttgtttattcatttaaaacacaaataaaagcagataatcaatagatcataatctaaaactagaggatttacaagttaataagcttgagtcaatagatattccataacaaagctttcaatgctgaacctgacataatttgctttgcactaagctggttgacttaatgctttaatttaattccaatattaactgaaaaatccaaagaaaaggggaaaatttaaatcctattatactgaaatatgttcaaagcaacaactcaatatcctgccacaactgcttaagtgtgccaccaaatgtctgcttaatcacctggtttctgattggtgataaccagttaacccgtttggagcctggtacaagtgaattgtggaagtttctcagtggtccattcatgcaatagcttttatcttagcctcaacagtcatcatattttcatctcataatgtctacttttcctgacttatggccaaattattggagttgtttttatttgaaaagcaatttctccttgtctcttgagattaccatccagcctgacctcccaaaaagcagaacagtaggcaggcctaggtcaaagaacagaagaaagcctttcttagttccctgaaaggaagatgtaagaagctatctgtatgaagaaatagcattagatggcatccatcatgcaaagtctggtagtactagtagaggtagtgagagggatgtgaggcaatatccagcataccttcaaggttatgagcacagactcaaaagacaggatccccccaggcaaatcctggttcttccccttacaattatatgaccatggacaatgtgcttcgactctcttttcatccatttccttatctgaaaaatgagggtcataatagtgtctatctcataaggttgttttaaggcttacacaatttaatatacataaagtacttgaaaagcactcattgttatcatcctttgagatactcttgaggcataaggaacttatgctaagaataattttgagaacagcagcatcagtcactgaatatagtagtcagatgtgtctttcagaagagttatgtgtgcacggccaaagtcctaaatattccatttgttaccatccttaaaatatcatttgtgaatttgtaactggtttttgctttgtgtcattgctggtcgactgcagtcagggtggcagtgttttggctgccccctaccatctttagttttctggtcccattagtgttgtgaccaagaacaagttagtgccctttgctcaagtaaatgggctagaagttaagcactgaccttttaccataggggacccttttctattctgaaagagaacttagaaaacagaacagaaatctcattgatttttacaatgcacattttttcatatttctccgtctctgaaattgcatgcatctaacaatcttataatcactgtagatggcagttgttacatacttgtcatttcctgtgcctgcacaaactctcgtcacttcacttgagttctgtgcaccgttggtacgacacacacattgagtttaattgccacttaaaatggcttcaaaaaatcatactatgatttggcattaaaataaaaagtatacacaaaaggcacagaaacagtcacttcatataaaacttaaaaagaaaaaacaaactatgcccatgcaagtctaaagaagtctttcaataagtataaaatacacatctaagtgataaaggaatcactgtgttcttgttgaattagcagcatatttttctctttcttagggatacataaaatagtttttaaaaaaataacagtgtgtttaaatagatgaaatcctggaccccaaaaataggtgtgttttataataaatatttttaaaacagctagcatattgccaataagataatgtatttaaataaaagataatttattcattccgcagacatctatagagcacccatatggtgccaaacatattttgtatccctagtccctgtcctctaagagttcaaggtctagtggggagaaaaggcaggtaaatagatcaatctaatataaaaatgccataaacagcagaaagaacagagaagagagacaagtaactcagtctggggagtcaagacactcttccaaatggagatgacattaaatttgtattttcaaggatggaaatacatcctttccaggcatagaagggcattctaagaaaagaggaaatcatgaacaaaagcgcagcctcattgaagagtgtgttgtaactgggtctgagtcatgagtctagggacagggtgtgaatgaaagaggcagaccagggagaggctaaggatgtgcccaaagagacaggctgcaggagattttgctggtaagggctggcaatcaaaaccaccctgcttcctaaccaggtctaggctctggcatcactctgacttttaaattaggaaagttagagcttgattcttgcacttgactctgtcaatgcattaggatctaggagagatggtaagtgatgttggaaagcagtccaaagttcataagcagttagctatttccatccaaggatgccatgatttcctctcctgaaactaagtgaacagccatgggtaaaaatgaactgaaggcagaacatgggcctctcatgtaaaagcagaagtaggggattcccaggcaagatggccaaatagaaacagctccagtctgcagctcccagtgagaccaacacagaaggtgggtgatttctgcatttccaactgagatacccggttcatcccactgggactggttggacagtgggtgcagcccatggaaggcgcagaagcagggtggggcgtcgcctcacccgggaagtgcaaggggtcggggaactccctcccctagccaaaggaagccttgagggactgtgccatgaacgactgtgctatctggcccagatactacacttttcctacagtcgtcacaacccacagaccaggagattccctcaggtgcctacaccaccagggccctgggtttcaagcacaaaaccaggcagctgtttgggcagacactgaggtagctgcaggagtttttttttccataccccagtggcacctggaaccccagcaagacagaactgtccactcccctgaaaagggggctgaagccagggagccgtgtggtcttgctcagtggatcccacccccatggagcccagcaagctaagacctactggcttgacattcttgctgccagtacagcagtctgaagtcaacctaggatgcttgaccttggttcggggagggatgtccaccattatggaggcttgagtaggtggttttcccctcacagtgtgaacaaagccaccaggaagtttggactgggcagatcccaccacagcaccgcaaagccgctgtagccagactgcctctctagatttctcctctctaggcagggcatctctgaaagaaaggcagcagccccagtcaggaacttagagaaaaactcccatctccctgggacagagcacctgagggaagggctggctgtgggtgcaacttcagcagacttaaacgttcctgcctgctggctctgaagagagcagcagatttcctagcacagcacttgagctccgctaagggacagactgcctcctcaagtgcgtccctgacccctgtgtcttctgaaagggagacccatcccagaaggagttcatagacatctcatacaggagagctccagctggcatccggcaggtgcccctctgggacaaagcttccagaggaaggagcaggcagcagtctttgatgttctgcagcctccactggtgatacccaggcaaacagggtctggagtggacctccagcaaactccagcagacctgcagaaaagcgccctgactgttaaaaggaaaactaacaaacagaaagcaatagcatcaacatcaacacaaaggaagacaatgaaacaaccccatccgaaggtcaccaatatcaaagataaaggtagataaatccatgaagatgagagtaaaccagcgcaaaaaggctgaaaattccaaaaactggaatgccttatctccaaaggatcacaactcctcgccagcaagggaacaaaactggacggagaatgacttcgacaaactgacagaaataggcttcagaagcaaggtaataacaaactcctccgagcaaaaggagcatgttctaacccaatgcaaggaagctaagaaccttgaaaaaaaaggttacaggaactgctaactagaataaccagtttagagaagaacataaatgatggagcagaaaaacacagcactagaactttgtgaagcatacacaagtatcaatagccaaatcaatcaagcagaagaaaggatatcagagattgaagatcaacttaatggaccagtgcaagaagattagagaaaaaagaatgaaaaggaacaaacaaaggctccaagaaatatggggctatgtgaaaagatcaaacctacatttaattggtgtacctgaaaatggcaaggagaatggaaccaagttggaaaacacacttcaggatattatcaaggagaacttccccaatctagcaagacaggccaacattcaaagtcaggaaatacagagaacactacaaagatactcctcaagaagagcaaccccaagacacgtaatcatcagattcaccaaagttgaaatgatgaaaaaaatgttaagggcagccagagacaaaggtcgggttacctacaaagggaagcccatcagactaacagtggatctgtctgcagaaaacctacaaaccagaagagagtgggggccaatattcaacattcttaacgcaaagaattttcaacccagaatttcatatccagccaaactaagcttcaaaagtgaaggagaaatgaaatattttacagataagcaaatgctgagagattttgtcacaccaccaggcctgcattacaagagcttctgaaggaagcactgagtatggaaaggaaaaacttctaccagccactgcagaaacataccaaaatgtaaagacgatcaacactatcaagaaactgtatcaactagtgggtaaaataaccagctagcatcataatgacagaatcaaattcacacataacaatattaaccttaaatgtaaatgggctaaatgccccaataaaagacacagactggcaaattggataaagagacaagacccatcagtgtgctgtattcaggagaccaacctcacgtgcaaagacacacataggctcaaaacgaagggatggaggaatatttaccaagcaaatggaaagcaaaaaaagcaggggttgcaatcctagtctttgataaaacagactttaaaccaacaaagatcaaaaaagacatagaagggaattacatagtggtaaagggatcaatggaacaagaagagctaactatcctaaatctatatgcacccaatacaggagcacccagattcataaagcaagttcttagagacctgcaaagagacttaaactcccacagaataatagtgagagactttaacaccccactgtcaatattagacagatcaacgagacagaaaattaacatggatattcaggacttgaactcagctctagcagatctaatagacatctaacagacctaatagacatctacagaattctccaccccaaatcaacagaatatactttcttctcagcaccacatcacacttattctaaaactgaccacataattggaagtaaaacactcctcagcaaatgcaaaagaatggaaatcataacagtctctcagaacacagtgcaatcaaattagaactcaggcttaagaaactcactcaaaaccacacaactacatggaaattgaacaacctgctcctgaatgactactgggtgtagaatgaaattaaagcaaaaatacatacgttcattgaaaccaatgagaacaaagatacaacataccagaatctctgggacacagctaaagcagtgtttagagggaaatttatagcaataagtgcccacaagagaaagcaggaaagatctaaaatcaacaccctaacatcacaattaaaagaactagagaagcaagagcaaacaagttcaaaagctaccagaagacaagaaataattaagacgagagcagaactgaagaagatagagacatgaaaaacccttcaaaaaatcgataaatccaggagctggatttttgaaaagattaacaaaataaatagactgctagctagactaataaagaagaaaagagagaagaatcaaatagacacagtgaataatgacaaagggaatatcgctactgatcccacagaaatacaaactaccatcagaggatactataaacacctttacataaataaactagaaaatctagaagaaatggataaattcctggacacatacaccctcccaagactaaaccaggaagaagttgaatctctgaatagaccaataacaagttctgaaattgaggcagtaattaatagactaccaaccaaaaaaagcccaggaccagaaggattcacagccgaattctaccagaggtacaaagaggagctggtacaatttcttctaaaactgttccaaacaatagaaaaagaagaactcctccctaactcattttataaggccagcatcatcctgataccaaaacctggcagagacacgacaaaaaaagaaaatttcacaccaatatccatgatgaacattgatacagatattctcaataaaatactggcaaatcaaatccagcaacacattataaagcttatccaccacgatcgggtcagcttcatccctgggatgcaaggctggttcaatatacctaagtcaataaacataatctatcacaaaaacagaaacaatgacaaaaaccacatgattatctcaatagatgcagaaaaggccttcaataaaattcagcaccccttcatgctaaaaccactcaataaattaggcattgatggaatgtatctcaaaataataagagctatttatgacaaacccacagccaatatcatactgaatgggcaaaagctggaagcattcccttggaaaaccagcacaggacaaggatgccctctctcaccatttctattcaacatggcattgaaacttctggccagggcaatcaggcaagataaagaaataaagcatattcaaataggaagagaggaagtcaaattatctctgtttgcagatgacatgattgtacatttagaaaaccccatcatcttagcccaaaaatgccttaagctgataagcaaattctcaggatacaaaatcaatgtgcaaaaatcacaagcattcctatacaccaataatagaaagagagccaaatcatgagtgaacttccattcacaattgctacaaagaaaacaaaatacctaggaatacaacttacaagggttgtgaaggacctccccaaggagaactacaaaccactgcacaaggaagttaagagaggacacaaacaaatggaaaaatattccatgctcatggataggaagaatcaatatcctgaaaatggccatactgcccaaagtaatttatagattcaatgctaccccatcaagctaccattgactttcttcatgaaattagtaaaaattactttaaatttcatatggaaccaaaaaagagcccatataaccaagacaatcttaagcaaaaagaacaaagctggaggcatcatgctacctaacttcaaactatactacaaggctacagtaaccaaaacagcatagcactggtaccaaaacagatatatagaccaatgaaacagaacagaggcctcagaagtaacaacatacatctacaaccatctgatctttgacaaacctgacaaaaacaagcaatggggaaaggattccctatttaataaacagtgttgggaaaactggctacctatatgcagaaaactgaaactggacccctttcttagaccttatacaaaaattaagatggattaaagatttaaacataagacctaaaaccataaaaaccctagaagaaaacctaggcaataccattcaggacataggcatgggcaaagaccttatgactaaaacaccaaaagcaatggcaacaaaagctaatattgacaaatgggatctgattaaactaaagagcttctgcacagcaaaagaaactatcatcagagtgaaaaggcaatctacagaatgggagaaaatttttgcaacctatccatctgacaaagggctaatatccagaatctacaaggaacttaaacaaatttacaagaaaaaaacaaataacctcatcaaaaagtgggcaaaggatatgaacagacacttttcaaaagaagacatttatgcagccaacaaacatatgaaaaaagcctcatatcactggtaattagagaaatgcaaatcaaaaccacaatgagataccatctcacaccacttggaatggtgataattaaaaagtcaagaaacaacagatgctggagaggatgtgaagaaattggaacacttttacactgttggtgggagtgtaaattagtttaaccattgtggaagacagtgtggtgattcctcaaggatctagacccagaaataccatttgacccagcaatcccattactgggtatatacccaaggcattataaatcattctagtataaagacacatgcacatatttattgtggcactattcacaatatccaagacttggaaccaacccaaatgcccatcaatgatagactggataaagaaaatatggtacatatacaccatggaatactatgcagccataaaaaagaatgagttcatgtcctctgcagggacatggatgaagctggaaaccatcattctcagcaaactaacacagaaacagaaaaccaaacaccacatgttctcactcataagtgggagttgaacaatgagaacatatgggcacagggaggggaacatcacacactggggcctgtcaggggctggggagaaagaggaggggtaacattaggagaaatacctaatgtagatgacgggctgatgggtgcagcaaaccagcatggcacatgtatacctatgtaacaaacctgcatgttctgcacatgtatcccagaacttaaagtgtaattaaaaaataaataaataaaagcctgggtgtggtggatcatgcctgtaatcccagcactttgggagtccgaagtgggcagatcacctgaggttgggagttcaagaccagcctgaccaacatggagaaacgccatctctactaaaaatacaaaattagctgggtgtaatggcacatgcctgtaatcccagatactcgggaggctgaggcaggagaattgcttgaacccgggaggcggagattgcagtgagccgagatcgtgccattgcactccagccaggtcaacaagaacgaaactccatctcaacaaaaaaaatataaataaaaaattttttaaaagcagaagtaggattacagaaagcagagaagcccaaaagatttgaatgttcactgacaaacacagcaataaagtatttgatattgcaggcttcatttgaagtaaagcttcaggaatacctggaaaccaagctacaggtggcactcagctccctaaccagcctttgccaagaggaggggtctttccagagacaaccatagagagtaatctttagccatgttatcgtctaatatcaaaaatagggggcaggccaggtgaggtgactcacacctgtaatcctaacactgtgggaggccgaggcaggcagatctcttgagcttaggagttcaagaccagcctgggcaacatggtaaaactacatctctacaaaaaatacaaaaaaaaaaattagctgggcctggtggcacatgcctgtagtcccagctacttgtgggactgaggtgggagaattgcttgagcccaggaggtcaaggctgcagtgaacagagatcatgccactgcaccccagcctgagtgtcaaagtaagaccctgtctcaaaaaacaaacaaacaaaaaaaaaagagggtgtaatggaagtgttttaatatgaccacggcatcctctcactgagatctgctaccatttattttattttgtttgtttagagacaggtctcactatgtcacccaggctggagtgcagtggctccatcatagctcactgtatccttgacctgggctcaagtgatcctcccaccttggcctcccaaaatgctggttagaggcgtgagccaccatgcccccatttgtaatttaagctgataaatgagagcaggggcacaagtctgtatccgctaactcttcagcaacagctgacccaaggccagcaaacccattgcatagccaacaaccaaccagatcctgtctttctgaagacacacagagacagtagtcagatggttatgactaataaggctgtaaggttgtttagactgacaattggtagccatgctgggcaaaagggaaagaaagaaaattaagagaaagggaaaagagagagaagtgccatgcagcccctgagtgacagagagagaaactcagttctgacagttttccagtttcaaaacccaaacctgtaaagttgacccttgaacaacacaggtttgaacaggtccacttacccatagcttttcttctgcctctgccactcctaagacagcaagagcaattcctcctcttccttctcctccttgacctattcaacaagaaaatggcaaggatgaagacctttatgacctttctcttccttatgattttcttaataactttttctctagcttgctttattgtaagaatgcagtatataatacatataacaaacaaaatatgtgtttgttgacagcttatgttgttggtaaggcttctgttattagtatcctgttagtagttaagttccgggggagtcaaaagctatgtgtaggccaggcacagtgggtcatgcctgtaatcccagcactttgggaggatgagacaggcggatcacctgtggtcagaagttcaagaccagcctggccaacatggggaaaccctgtctctaaaaaaaaaatacaaaaatttgggtgtggtggcacacacctgtaattccagctactaggaggctgaggcaggagaatcccttgaacccaggaggcagaggttgcagtggccaagatcgttccactgtactccagcctgggcaatagagagactctgtctcaaaaaacaaacaaacaaacaaacaaacaaaaacagaaagttatgtgatatgtagacgtttgcctgtgtaggacattggatcccctaacccttgcattgctcagaggtcagctgtagcttctgtacaggcttgggttctatacttgccttttctcttccttacaaaaccaatcaaaatgagtttcttttccctgtaactaaatttccttgactagaatattgattactgccaattcccacctttcctgtaagttgtaagttttagaatctggttgtttttttttattgggaaatacaattgatttttgtatgatcctaaaattgctgaactctataattgtttatttttagattctgtggaccttttaggtagttaataatcatatctcatgcttcaaaacccatgtaccttgtgttagaataagataggataggataggctctggtaacaaataaaattccaaatctcactacctaatgcaataaaagtgggaaagtcaaaggtggatttggctgcccttctccatcttatatcagtgtcagatcatgataggggaagagcatgctgcagagttctgcaagaagcttttaaggtccagacctggaaatagctgacattccttcttctcacatcccattgataagaatgtctcataacctctctatttaggggcagggaaactagcaactgcgaaaaaagtaaaataaatgaatatttggtaaattataataatctctgctgcatagctctttttatttccttatcttacattgcctaggattaccactacaataataaatagaatgcatctgtcttatttgttatattaacaggaagactgctaaagttttatcattaagtatgattttgctatatgagtgctgaatttttctcttgagatgattaaatgtaaaacaacttttctaagggctaaatcctatatggtcattgctctggactgaatgcagttgcccactccctttccaaatccttacaatgaaatcctaaccctcaatgtgatgttattaggaagtggtaaggggacaaacaagtgaagagacagatacactagagtataagatctatcaagtaataaaggtggacctgtgagtaaattcaaaccatttttctctcttgagtagccatgcttatgacaaagaaattttgaatgccttgtgggttgtttgtttgtttgttttgagatggagtctctctctgtcacccaggctggagtgcagtggcgtgatctcggctaaccgtaagctccgcctcccgggttcacgccattctcctgcctcagcctcccgagtagctgggactacaggtgcccgcaaccacgcccgtctaatttttggtatttttagtagaaacggggtttcacagtgttagccgggatggtcttgatctcctgacctcctgatctacccgccttggcctcccaaagtgctgggattacaggtgtgagccaccacgcctggcaagaaattttgaatgtcttgttttcaacaaatagttttaatttaaatcgaaaagagtgtgtaggtatgagttgcgaatttgtaattcatttgcgattctggtattgatggattgtcttatcttgtacaggtcatttgggccctatggactttaggctcaacaacaaaatcagacagttggagtacagtgccagtcacaatttttagactgtttaaccctaaatgtctttctaataggccttatttatatgagaacattttatagttaaccacaaatattttgtctgtgtttatcaagagttacaagcatagcagccctttctttactgaataaaagttcaaacaaattggattcatctttatttggagctgccaattaaagtgggatatagtatagttaagcagtactcaacatgtaggccactaatctcttagggtcccaaacactctttcaggggctctgccagggaaaaactatgttcatactaacagtaagaacttacatgtctttttcaccttcatccccttcatgagggtacactacagtggagttttccagaggctccatgatgtatgaggatgtagtcactctgctggctagtcgtatacatgtctcagtattcttttcctttaaacacttctctactttaattttcaatatggtactattgatcgatataaagatcagaaacaaaagttctttgggatcttcagttgtttttaagaaacaggggtcttgaaatgaaaacactggaactactaatacacttcacaagtacattttacctccacatagcacagaaataaaatcataaccctgtctcttgtcagcagtatgactctaggtaagacatttaacttatctaagcctcaatttccttatgtataacaatacaaatctcctagcttcatgtgaagatgaaatgggatacaccaagtctgacatagtaggagcaaaaactttgctcacaaataatctaccttaggaaggatagacaagaaaatggtaaactggttgggtgcagtggctcatacctgtaatcccaacaatttgggaggccaaggcaggtggattgcttcagcccaggagttcaagaccagcctgggcaacttagtgagaccttgtatccacaaaaaaaaatacatatgtgtgtgtgtgtatatatatatatatatacacatacacacacacacacacacatatatatatatatatacacacacaaaaattagctgggcatggtggcacacacctgtggtgactcaggaggctgaggtgggaggattgtttgagtcttggagacagaggttgccatgagccaagatcatgccacaatactccaacccgggcaacagagtgagactctgtctcaaaaaaaaattaaaaacgaaaagaaaatggtaaataaataacttttgttaccataagggaggagaactaaacaactggggcatgggggaggagatggggaacttttcattgttgctgcacccttcacttagaaggtccagtttatgaaaagtaataatttagttaaaaccttcaaaaatgatttttaaagaatttccctgctcctcatagatatagcctggtagtttacataccacttcattttctatgaagtactgttgttgcaaatttatctatgcaaagagctaagcatgcaatgattgttgctgtgggtataaaatactgctttgctaaggatactgtagctaactcacagttaattggctgaggcctgagcacacccatatcagtttgccatatacagatttttggttaacttgatttccatatgcaaagtgagaagaaagttctaattcatatatatatatatatgtaaaatatctttctctcctgagtcatcaatctctacctcattattgaaaaattgccatcaatataaaaatatactcctggtatctcccattttttaaatatgtgactccacgggcccctccagctaccatctcctgttcctgttcccctttacagtttacagccaaacttctcaaaagaatatattactattccctgtttctacctctacacatctgttctcccttccacccactccaaccaggtttctgtccttatcactccattaaaaggctcatatcaagacgatttgccacgaaatcaagagctcttcctatgcacagcttccttaacatttcagcagcatttgacactgcttaccacacttctttaaaaaataccctcttctctcagtttcaaggagaacacactgtattggttttcttccctttattgtcctggtctcagcttctattactgatttcctttcggctgctgtccaagtcagcctcatcctgcatctgccactgagtttggtcctgagctctctcttctacttgacctacactctctccttagactattcctagactcattcaagtctacttcttagacttcactctacattcgcttcttcaccccagcccttcagcttaaattctgtccatattcactgataatacaaatacttttgaacacttactctagcccagccacaattagaggcatttggggtttagagagaatgaagtagatgcaggcctttgactctgtggagtttacattctggcaaggaaagacagacaacaagcaataatcataaaaaaatatggtatgttagaaggtgatgagtgcttaagaaaataaatcaggataaaaagaatcaaaattgggaggagacagggaggagagtgggtcagttgcagttttaaagaagagtggctcattgagaagatgagctgaagttactcatgcaaacctatgcataaagtgggttgcaggcagagaaaacagccagtacagaggcctcaaggcacgagcttgtttagtatgttttaaaattttcaacaagactagtgtggctgcagtgcagttttcccaggggaaaatgataggagacaatgtcagaaaggaagtggaagggtgggcagaaagaacaggctttgattatgaataacttgaggaactagaacagggttttgagcagaggagtgacatgatctgacttgtgtccaaaatacacttttgctatgtggacaatgaggatttaaggttaaaaataggctaactggctgggcacggtggctcacacctgtaatcccagcactttgggaggccgaggagggcacatcacaaggtcaggagttcgagaccagcctggccaatatgatgaaaccccatctctattaaaaatacataaattagcctggcctgttggtgcttgcctgtagtcccagctactcaggaggatgaggcagaagaatcgcttgaacctgggaggtggaggttgcagtgagccaagaggctgcactccagcctcagtgacagagcgagattccatctaaaaaaagagaaaaaaaggcaaactgaggctactgcagtgctgagagtgggaaagtatggcttggatcagagtggtagtagtagatgtggtgtgaactggtaggattctggatgtatcttgaagttaaataaatccagtcctatttcctaatgagtagagtagatgtgaaaaaaaagagaaaatgaatccaaagtttttggcctaaacaactggaagaatgaagtcgtcatcaactgaaaaaaagggaagactgcaggtgaagcagcttttctaggtacatcagaatcatttcagtcagggagactgaacactatgggttttgagatagaaagtttattattattgttcattagagacagggtcttcttatgttgcccaggctacactcaagcttctgggctcaagcaattcttccaccttagccttccaaatagctgggactgcaggtttgcatcaccacacccagctaaagatgagcgctttctctaggaattagaccttacgcaattgtgggaatagctgggaaagtgaagatttggggaggagagtaagaagatgggtaagggagttgccaccatgcccattcaagaagccaaggatggccagccaccttagtgtccctaccacagatgcctatggagaggtctatggaaagcaactcctctgtttagctaccatctctgtggggccagcactaagtgtcaggtggtagacctgggccactattggttaaagagtcagcagctggaaagaagagtcagattggagtagaggagaatgaggacaatctggaacccacttgcacctctgtgtctattcatcttcacatctaacttcaaccaacttcgaagagtaatggccactgatttactttcattctccaaattgtatgtaaatgtatctttaatccagaactagatagagaagatatattactgctatatataacaaagtacaacaaacttagtagcttaaaaacaatttctacttgttatctcacagttcccctttgtcaagagtctcaggccttttgttcgaggtctcataaggctacaattagggtgtctgttgggctgtgttctcatccggaggtttgaatggagaaacatttacttccaatctcattcaagttgttagcagagttcatttctcttgtgtgggaatgagagggaggccctggcttcctgttggctgttggccctcatgtcctagagaccacctagttcccctccacaggggtccttcacaggccctctcatagcatggcagtttacttcttaaagaccagctgaaggatttcactttcagtctgctgagatggtgtctgccatatttatggcagtgacatcctagagttttgccattttctattagttagcaacaaggcataggccctgactgcactcagggggagggagaatcacacaagggcatgattcattgcaggggtcaccttaaggtgtgtctcccacagaaggaattctgagatatgcagtttcaccttaaccaatctgacataatacaaacttcaaaaaagggaaaatcaagagatcatatggagacttgttaagtttcagatgtattagacatccaaatgaagaggttaacaagacaattggatacaagactggattttgggagatatgtccaaggaccctcaaatgtgtattcctaattcagtctcttcccaaaactatagtttcattggtctgtctacttgacatcttgaacttaacaagaccaaagttgttccttcccttcccaaatctgttactgctcagacttctacatctcattaaatggtaccctcacctaccctttctctcaagaagaaaaacctaagagtcgtccttcattcctctctttcccttgccttctacattcaatccatcataattctattggttctacattcaaaatataaatctatccccttaattctatgtctaccattaccaccctagtccaagccactattaccccttcctggccttcagcaaaagcctttgaatgtctcccctccctctcttgacccatgttatgaaatggattgtgttcctcccaaaatgcatacactggagccctaacccccaaggtgactgtatttggagatagggcctctaggaaggtaattaagcttaagtaaggtcataaagatgggaccttcatcctataggattaatgttcttataagaagaagagacaccagagatatctctctgcatgcacacaaagatgacacggaaacacatccagaagacagctgtctataagccagaagagaggcttcaccagaagccaaccatgaagacaccttgatcttagacttctaacctcaagaattgcaagaaaatgaacttctgtgtttaaagcaactcagtccatggttctttgctatagcagcccgagtagacaaatgcaatggcctccatatattgttcacacatcagccagaatgagttcttcaaaacctagattaaattgtgtcacacccttgtttacaggccttcgatagttttccactgaaattggaatcagacttgaactctttaccttggcctccaggattgataccatctagctcctgctcatccttttgaccttctcttgggccattcttctctccatcacccagcttggtcgcactagctcctttctgtcaacaaaaacaccaagtctgttcccatcttagagtttctgttctgctcttgctcccaaaactttgtcccctgattcttcacacagatggtgtttttctgcactcttgcctaaatgtaacttcttcaaggacctttcttacccgcccttgtaatcaagaatttcattcactcttccccaatacctaagcccaaacactaattagtgcaccaccctacttattcccttcataatttaccacaatttccaattctctctctatgtcttgatctctctatctccctctgtttatatattgcccatttgtcctcctttataatgtaaaattcgggaaggtaatgaccttgcctcccttgctttctattgtatcctcagagattaggagcatgcctagtgtataagaagctctcaatacatgtgtgtttaatcaaggcttaaataaatctaaagctatggcccaaatgaaaatttttatatgagttttagtacagttttgccactatttccatagaatagattatcagagtgaaattgctgggtcacagtgtatgcacatttttaattttgatagatcagaagtactgctttttaatatttagtgtgactgatttgccactttaaaatttaattatcacaaatttaatttttttcctcttctcctttgaaaaatgaggcatttcaaaaccatttttcccccaatgtttttatggtaactgaagcatcattgttcattttgcaataactctagcttttgctttataggttaaattgatacagccaatttgtctataaagaaaatgtctgtgaattgagtcttctttttgaattgacccctccattacaaaatgaatgatgtattctaaagagaggaaaaaaaaaaccttctcccttttcacgtatcattcttcttttctgagtgtagagagttgttggagtaaaagcattaaagtgatcccagtgttaatatgtggatcctccaagctgaacattttaagtttgaaatttacaattgttataacaattgtcccctgcctaatccattaggtgacagcattagctagaacccagagctaggaatgctttaacacttatgagtacatttgagttggcctcattgttacccagtcgtcaatagtgtccttaacatttccagctgcctcatcactgtttgatatgtacaaggggctgggacaagggtgtagagggttccactcaaacatgtccccagtatcaggagaaaacacacttcaggaaggcatggttctgatagtgggtcaggaaagaaaataggaaaattggttttaacaccattcagttattatacttcctgcctcaattgaaatcaaaagaaaaatccttgtgtctaaagaataattacaaattttgaaatagagtgaacgttccataaagaaaattttaaatcttttttctaagaaaatacttttcctattaccttgtgcaaatggcaatctatacttattggctgaataataattgagttaattaattaattcctggcagatttattatttcattagtcactgaccatgatctataccacgatagggtgaaatttaaaagttcttccattattccttcaaattgcattgcagagctcttcacacataattaggtcttaaattttttgcctaatgttacttattgtttcctaacaaatgcagttcaaaaactttagagtgacattcacagccctctttagtcttatcacaatcccctttccagccacaatccctactattcccctgcaaccatcacacttctgctttgttgaactgccacccaggtatctccagaactttctactgttccttcttctaatccttcatctatttttatctgctcaaattctacatctttcctgacctggatcaaatgccacgtctcaattaagtcttccccaagtcctcaccccctttcttctgaataacaagtatttccttagtatttctctggtgcttattatagcactgccacactgaattgtgtgtatgtatatacattattgatttgctctattagattataagttcctcagagtcaagagtctgtgttacccatcttgtatcttccattgcaattttatagagtcttttgcataaaagatgctcaaaaatgtttaaagaagtaaaccagctgctgagaaactgctaaatgtttgcactgagcattttggcagctgtgtcatcccacttggtgatgctgcctagcacatacacactaaaacaataggcctgaacactaaacaataggccatggtcctaaagggtattttgttctacctttcttgtattgtgagttgatctttgattccggagcaactctgcatgtacgtgtttgctgtcaaaataaatgtcttttttgtctcaccagctgagatacatttaggtgaagatggcactggtaaaggaagtgtgcaggtgaagttggtgaaaatgttctgacaatgtttatattttgcaggcttggaagtctcatgccaagtgaaccatggataagtattcaagtttgatatttgcctaatgcgtggtaaaaaaataataataataatttctgtatcaagactgatttgatggccaggctctgtggctcatgcctgtaatcccagcactttgggaggccatggcgggtggatcacctgaagtccgaagttcaagaccaacctggctaagatggtgaaaccccgtctctacttaaaatacaaaaattacctgggcgtggtggcgggtgcctgtaatcccagctactcgggagactgaggcatgagaatcgctcgaacccaggaggcggaagttgcagtgagctgagattgcgccattgtactccttgcatttcagcctgggcgacgagagtgaaactccatctcaaaaaaaaaaacaacaacaacaaaaaaaaaaaactgatttgaattttgcaaaatagtattagacataaatatgttgatcaacttttggggaacttaaaggttaactttataaatggagaggaaaaatcgtcctgcagaatccacgcctcaaattatctggctttcaaaaatctagaaaaatattttgtgttgatttgtctacattacgacatataaaagtcatccaattgcctggatgtactctatccaaagtcatggcttttagataacagttaatgggagctcgaactgcttctcacattttatttgtaatctaaatcagaaactctaggtctcaggtataatcattccttatcattaagacaaaataaaatataattaatgataaaggatctcggcagttcaacttaagaatacagaggttaatatacttaaatctagattcttctgaagttctctttgcacaaaaaggtgaatttttgatgtgacttattctctggttcttggtattcatcataactaaggaggcaagggaaccccgtgacttggttgggatgcagaagccaaaactcatccatttcaggataaagagcccaggataagggagaatcataaatgaaagacaaagccagaagaaatcccactggcttagaatgaagttgatggtgaccaggaagattaaccctttccaaaatataatatggacacgtaatactctgttgatgaacacaagagtgcctatacatcattgttttggttcattactgggagcagggtaaaaagattcctaaggtctacagtaagtgagcttagtgaaaatacaccccaaagaccagagggaaagctctggaaactgctggatcatcagatcaatagactcaaagatgactaagttgggaagctttatgcagtttaaacatttgtgcagggagtatccccacacagccttttattgacagctacagatcaatggtaatttttgatcattttcaacttacataaacctattgaccccatggccacctttggggcacttcaagtcatcaaaaataatcagaggagatggtgtaaaattgtcagactgctgaagactccaagtagttgcatatgtccccaggagctgagtcgagaggttaaaatatagttcaaattgccagcagaacctcaactgacagagtgttccagagagtcttgtctttatgtctcataaaatgaggcactgatttgtatccaaactctgaccttcatgcatataaagttaaagaaggaaaaaagaggctgaatcccattgaagatattagattgcaaagaatggattattcctagtaaaatatttcttcctgtttttctttgttgagtcatcttcttcatctgctgcctaacaaaagtagctgacatgcttgtagaattacgtacaatatggacgtggacatagaatgaacaaagacaaaacagaagcaagtgcaaggtggcaggccagaagtcagggacaacaaaaaatgtagtcaaaaaaatcattaggaagagtgaaaggaaggaaagagcaaaataatggcaataaaggggaagaagtaagagtattgaattaagataatctctatagaggaaaaggagtgagagaagaaggaaagggtgaataagaagaaagagaaaggaagaaacggaagaaaagtgaagcaaaggagtaaaaggaaggaaaatcgtctttagtgatgacttttcctagttagtaagacagaacgctacatctccaaaggaaggaactgaatccaaaacatctaagatccacagtgctcaagcaaatatcctaaatttaagaaaaataacaagaaacttagtacgtaaatgagagccaacccaattcacagagtgaactgcatccaaattttgcagcaggattctaaaatagtgaactttgatgttggaaattcattcaggagagaataatataaattatttcctaaaacgtcaaagaataaattggcaaggattatcttgtcatttttatgttttcttcattttttaatatagcttttactaaacattgacaaaaaccatggctattgtttagatctatttaaggagtctatatgtggtttgtgtgtgtgtgcgtgtgtgtgtgtgtgtgtgtgtgtgtgtgtgtgtgtgtataaaactattcaggaataacaaagtagccagatgcagcagtggcttgcacctgtaatcccagcacttttgcgcagccaaggcagaagggtgacttgagctctagagttggagaccaacctgggcaacatagtgatacccaatccctacaaaaaaaggaaagaaagaaagaaaagaaacattttgttttaattagccacacacggtggtacatgactgtagtcccggctactccagaagctgaggcaggagaatcacttgagcccaggagttcaaggctgcaccgagccatgatcatgccacactccagcctaggcaaaagagccaaaaaataagaataataataataaattaaataaataaataaataatgtaatatgagaacttgtcctcagtataatttcatgatacagaaattacttttacatcccaacatgtggttatttctctcccttttttttttagatacatgtagaccaggttaagcaaaacaactgttgtaatgaccctttgtaggagtatacccctaaaaattttctgtgccaggcatgcatgaacttcagcttgcaacctacaggccatatttctatattagatggtggaggtttggaagctagggcattttgaatacttctgctttcaaggatctgagccgtaaatgtttattaaacgaatctataatgaaatcagttttgttatttttttaatggttgcctggagtgtgttggatgactgaatgccagttgttaatcattaagtactcatgttaccaaaagtgtttgatagtattgccatctaggggctgaatggaattctcagctctgaaataaattataattgagcaggtgcagctattgacaatatacatatgtttttgctttatagcccacatgcttttcatgtttcttatgacaaaagcttatgaaaaaatgtcccccagcagcccaccttttttatatataatctgttagaggtgattactatttgctttggagcgtatgcttttttggcatctattactgaatattctgaacaaagaattattcttttttgcattattaatcttgcccatgtttgccctatttccacagaaaaggaatcatttatcagaaaagagtgtttgtaatcgggacttgtagcatcttcagatttaatattcattatggtcattctagttctgtgctatatttatctaaaaggccaatccaatgttatggagaaataagtttttaaatatttatgatctaacttttaatattttaaaaaagagaaattagtatttctgtaaaatttgtttcagagtctgattgctcagcaaatgtttaaatattaaaagatttcaagaggttagcgtgtaatatcataatgggacttattgaaataggaaaattgactttacaagtttttgatatgtgaaggaaattgtattttctctgcctatgtttaacacataacaagaaataacacagttaaaatatacagccaataatgtcagaaaacagcaccaaaacctatttctacattgttttgtttttgtctaaccagtttgtttggaaaacaattctgtttgattttgtcatcttgttttagattttatccaaaatgatatttggatgcccccacacataattttttctgatgttcttgggtgcctactttcagaaataactttcactactccactttatattcttcttcccttgttcatcaaggaaagaagacaattgaagaccatgtatcacattcaaacatctaataaaccaaagcagatcattgaatgtaaatatcctactaacccagtcaaaactttctcatgatttcttatatccaatggggatggtacgcaacagaaaatgccagtgtgtgtgtgtgtgtgtgtgtgtgttcgtgtgtgtgtgtttacctatgaacacattactaccccacttgcatacataattcctactttaaaaggacatatcctttcagtccagatgtggaaagagcaccccagggcctttagaaacattaggattcttagctccagtttagttatgccaaatatgttaatgctgctctccaagcagaaaaacaaacaaattttaaaaatcctaattaggctatccctttttttcttttcttttaaagcaacaaagaccaaattctccaagcctagctaacaattacttttggtaggtttcatagttttacttatggtgcttttaacaaatgaaaatatttttatatctatattaataatagacttctctaagggtgtttgtacatgtatagttgaattggcttgttactgttttcttgtgtttatttgttttattgaattcgtaagatatatatacatgccaagagaatgagagagggagactgggaagatggagagtcttgtgtacaaacagatttggaaattaggggtgttcaggttaactctccaaacccttaatattaacctggcaggcaattatcccagtctcagacatgcagcttggcaccactgatttccattttgagctggatgcagcactgatctgaagcatcatgttttgtttttttttttaatgtttatatatcacacgctttgggctgcaagcactgaaaagtcaaggatgctatctggtccactttctgagtgtctgaaatcatacaacattgggtaatatattcacggtgtcaacaagaataagaaaaaatgcgttgttttcttaatgataattcaaaactctgctgtagtgtttgcgctgctgttgcctacaagctttggccatgaggttcagagaatgactttccagcaatattgtcagtttcaaaaaaaaaaaacaacaacttaacctgttaattttcttacagggaacaagccatcaagcccacctgtacgggttagaaccattcacaacatatcgcattggtgttgtggctgcaaaccatgcaggagaaattttaagcccttggactctgattcaaaccttagaatcttccccaagtggactgagaaactttatagtagaacagaaagagaatggccgggcattgctactacagtggtcagaacctatgagaaccaatggtgtgattaaggtaatgtctaccctgcataagaaattatgtttggtgttctccagataaatagatgagccctgacatgccatcaggtcactgtgggaaaactcccttcacagcctgtttaattctccttgatagctcctccaggcacttaatcatagatcacagaaacctagcttagatgtgtgatgcttcctataacccaacactgagctaaatgctctccatggattatctcatttaatcctcacatcaaccctactaggtgggtaccaccaaacctcatgaggcatatgcaggctaagtaactgcccaagcctacactgtaagtaattgagttgggatttgaagccaggaactcacatcagaactgaactctaaatgactgtgttcttactgcctcctgaattaccctacccagttatttgcttaagacttgcctaatttatgcttcaaacagagctcattaagcaagccacaggtgtctgctaacttcccaacttctgtatgtagccgtgagaaacaatgttataaatgttgtatacgtatctcaagctctgccagcccatgagtacagggggactgtattttcatgaatagcctgcattttgatgttttgaaccttcagccacacaaaaaccagccttcatctacctctctgatgttcctccccaaggatggtggcagacatacctgttagttcatactactgcctttacctccagtctctcctggccgtggtccatctcttaggccctcatcaactaccttctgcgggctgggactgcagagtcccccagcctgcagctgctatagacacactacccttttctttgccactccttctccaagaggcagactcccacatcaattccacatcacagggttgagactaagctgttacttttaataaagcctccctgaaaaccctaagagagggatgacagcaggaaattacgtgcagcaataactaagaactgtaactagagctcacagtcccaggtccatcctgtgggctgcctctctgcctagcttcaaggcctgctgcaagtagcagtagcaagctgcttcccaccagcctgcctacatgtggacagaagccagacttctcccccctggggcaagaggcttgagccttaggattcatgaccttaaaatccaaatcacggccccaaggcacccatcagaaaagaaagctccttttccctcaaagcacttctccttgtgggtatttggagtcatgagagcatctgcttcttggtggcataattgacaataagaatattgactccttggacctttatttacatttcaccaaatattaagcaaatatttggtgaaatacttctactaagtgccatatacttattcaagagtgaacaagacagtcaggttccctgatgttacagaccgtgtgtgagtgcacgtgcgtgtgtgtgtgtgtgtgtgtctgtgtgaataaatgtggcagagtatatgaatggtgggggtacagaaaagcaaacaataagctagtaaataaataagcaagggaattactgagagcgatgaatgctataaagaaaattaaatagaataatgtaattatgcctgctcaggctattttagaatggaatatcatttgaatcaagttgacatttgagctgagtcctgaatgacaagacagagttagtcatgtgaggatatgggggcaaaatgttccagacaaaatgaacagcaaatgcaaggcctgaagccaggaatgaacttggtgtattcaaggaaagagaagaaagctagtgtgtatgaagtatttgggagaaagaaagatggcactagaagaggttggagggactggtaggagacagattgtcccaacattgtaggctgtggtaaagtttagaatttgttccaagtgcaatgaaaaattactgaaggctttaagcaaaggaatagcatgatcaaatttacgtttttaaaaatcactctggctaccctgtggaaaatggactatataaggaccaatggagtttgagaactattaaagatttcaaggtagaattgaaggtgggtcaaattagagtagcagttgtgaaatcatgcactataggtgaatcgaagatacattcagaagatagagatgacaaaatgtgttaatgagctgaatgagagacatgaaggaaagggagcgctttgagatgagttttgggtttaggctttgggctattgatgaggaaggggagactggaagatgaacaagttaggagcaagtagatagtgtgaggtacaagtctaaaactcctgagagtgttctttgctgggataaatgttcagaatccgttagcaggtggatgttatataaacccatggtgccagaggagatcagctatggagagaatgtaactcaacctgttgagagtctgggatcaagccctgaggcataaatgtgggggtcaagaggaggaaagagagccagcaaagactgataagagggaactaggctagaaggaaaagtgcatgagtggagtgtccaaaaagagaagagaaaatatgccaaaatgttgctgagagcagaagtaaaatgaaggcagagaagccaccccgagtatagaaatgaggaggtcactgtgatctcgacaaggagagtatgcagtagaatgggaaacctggttggcatggctggttgaggagagaatggcaagggaggaagtaggacatcaactcattaaagccatttagatgaaaagaaaagcagagaaatggagcaataggtggagactgtgggatgggaagttttatttaaaatcattgaaaaatactagagtacatttaaacacgaatagaaataaccagtagagggagataaactggtgacgtaggagataatgagaataacggcagtagtgaagtcttggggaaggaggaagggatgggatacagcgcttaggtggccttcagtaggtacagagatatttcattcatagcaaaaggaggaaaagcaaatcatgtaagtctagattcacatggatacagaggtcagaatatataacatggaggcattcttctctaactgcttctattttcagtgaacgatgtggttatgtcaacaatcaatcaacggtgagggagggaagagggtgttagtggttaggggaaaggaagaaatatgaaataatcacctgggaaaatgacagagcaaaagcatgagggaataaaataggattacaaattggtaatcgcctatttaaaatgtatggatagaagtttaaagtgagaccaataaaaatgtttgggtgtttttctacaaacccatttcagagcttgagtatagagggacagctaaattttacactaattagagatttgccgggtgaatatcaggggcagcaaggggtgcttggggggtcacagaggctgcaagctagttatggaacctatgctcccttcagaagatatggcagtccccttcccacatgggggtggtcttgccctgggtcctcaacaagaaaatcacaccaacatacaacattccaacataaagaggtttccaaacttctaggctgtgtaatcttagggaaaaaatggagtatgttaacaatttagtctaaattaagcttgcccaagaaccacttctgggaatgtttcaagggtgtgccttccaagggctgtaaaatgtgtcctgtcccctcttgagagtcaccatgatagggagtcatcgaaaggagtgtgtcatctctctcaggtttgttggagcaggaaaaggttggaaaatcactgttcaaaaacacctgcattcagattaacttacttcccatctttcaaaaaaaatgaaaacttgctctacatttgtacagtataataagcattcagatgtttttttccagaacaaaagactactttgcccccaaaggagcaatcagttcttccatggcctggaagagaaaacagggtgtttttttccatcccctagtcataaagatttatatacatgtatatatgtacatgtatatatatgtatggatatttgtacttatgtataaaatataggtgtctgtgtgcctaaacacacacacacacaagcatactctttcagccctggcactctgtaacaacaaatgattaagcgttgtaattccatttcccagcaaatgccgtggaaggtagaccctactttagtcagtatgagatcagaagcagttcatatccataaaacaggagactttaatactattctctactttaaaaaaatacaaataggagaaaccttgtgaataccatttaagtcaaagaatctgattcaatagcccttagttttgagataaatgtttatgtagttcccaaactgaaaaaaaagaaaagaaaaaggcaaagaaaaacattgtttgtctctctgtgggccttatgttaactgaaaaaaatcacatatccccaattaatatcagaatacttcttctaaattagggtcatcaaaataaggaacaagggggtgaaggttaaaaaggggctaagtaactacacaaagaaattgtatgctgcaagttatcccttttgcttctgtccttctgtagacatacaacatcttcagtgacgggttcctggagtactctggtttgaatcgtcagtttctcttccgccgcctggatcctttcactctctacacactgaccctggaggcctgcaccagagcaggttgtgcacactcggcgcctcagcctctgtggacagatgaagcccctccagactctcagctggctcctactgtccactctgtgaagtccaccagtgttgagctgagctggtctgagcctgttaacccaaatggaaaaataattcgctatgaagtgattcgcagatgcttcgagggaaaagcttggggaaatcagacgatccaggccgacgagaaaattgttttcacagaatataacactgaaaggaatacatttatgtataatgacacaggtttgcaaccatggacgcagtgtgaatataaaatctacacttggaattcagctgggcatacctgtagctcttggaatgtggtgaggacattgcaagcacctccagaaggtctctctccacctgtgatatcctatgtttctatgaatccccaaaaactgctgatttcctggatcccaccagaacagtctaatggtattatccagtcctataggcttcaaaggaatgaaatgctctatccttttagctttgatcctgtgactttcaattacactgatgaagagcttcttcctttttccacctatagctatgcactccaagcctgcacgagtggaggatgctccaccagcaaacccaccagcatcacaactctggaggctgctccatcagaagtcagccctccagatctttgggccgtcagtgccactcaaatgaatgtatgttggtcaccgcccacagtgcaaaatggaaagattactaaatatttagttagatatgataataaagagtcccttgctggccagggcctgtgcctgctggtttcccacctgcagccttactctcagtataacttctcccttgtagcctgcacgaatggaggttgcacagctagtgtgtcaaaatctgcctggacaatggaggccctgccagagaacatggactctccaacattgcaagtcacaggctcagaatcaatagaaatcacctggaaacctccaagaaacccaaatggccagatcagaagttatgaacttaggagggatggaaccattgtatatacaggcttggaaacacgctatcgtgattttactctcaccccaggtgtggagtatagctacacagtaactgccagcaacagccaagggggtattttgagtcctcttgtcaaagatcgaaccagcccctcagcaccctcagggatggaacctccaaaattgcaggccaggggtcctcaggagatcttagtgaactgggaccctccagtgagaacaaatggtgatatcatcaattataccctcttcatccgtgaactatttgaaagagaaactaaaatcatacacataaacacaactcataattcttttggtatgcagtcatatatagtaaaccagctgaagccatttcacaggtaggtagccatgtctcggttttctgagagtaagccactgctgacctttctattgcctgagcccttggtcagttctaatgaagactctaaaaatgggatgcaaggtgtccccaacctccatccacctaaacgtgcatagtagacaaagcacatcctcacccaagcaaagcctgcttgcataacctccagagagcagaattctttcaggtgatgttttgagagtcagtgtttcagaaaggtttgcaatgcatcctggtatctgaaataagtaggacagagatgaggctagtccccctggaaatacgcaggcccctggacagttctgacagccccgatagggtcatctggccagactgtgaagaaaatgatgtattattttaaggttaaaaagtgccaatcaatgagcgcaattaccagccagagttagactaaaacaaaatttgtttcgtgaagagccttcttatcaaatccagcacttcttccaggaataataaggcttctctgactctactttcttatggtttctcaggacagtgccactttgctagctcatgttttcctagcggtcccatctgggctctgtgacatgcatggaagtgcgttgttctccacacaaaagaatcttgcccattgtttaaataattgtttggcagttttccccatcacattttaagtaacttacatccccagagagaagggtaataagagacattttatgcttaaaatttagtaaaatgaacagaatcacttaaaaaaattaaaggctgaaagagtgttgatttccaactacctcaggtaaaattcagctattattgtaatctagtgatgtgtagattagatcctcctataattacctctgatatatagtgctgttgaaatgaaacattcgtggttttatgcatctactcatgacaattatttagggtctattaaatattaaacagtaattaaaacttcctcaggtatcctctgcagctaatccacatgctatgtgagttggcttttatattaccttacactgattcagggcattaaaaaggtccactgtagctgcagagctgtatattctagactggcttcctctttacctgactgtacctccaactttcaaaaaccatatcaatttgctcccttttgaaactcttattcaaaaagtattctagaggtgaaagagtttgtccaggcatgaaaggaatgctttttccaggctggaaagaaaagtttaatttatctgataaattgcaaggatatttaagaatgtgagagaaatctcttcattatccactctaactgaatctgtaagtggcattgacataaaacagagtatcacttctatatgaagttggagttcatgcgtggttttttgtttttgtttttagtggattaatgttcactgaatattgcaaatgtgtgtgtcctcctttcagcacccccagctggtcagtaagaagaaatagtctgggaaagtcctaagtagcagaaggaatccagcccaaaatttaaaaactaccacggataacccagaaaatgaataatctttatgtgggaaatcaaaattgacttcacagaattgcttagaagtcagatctaccatacacagctatggatttgatcaccaataaactggtagccctgtcatggtggagatcggcatgagaggagaaccaggggaggaggagaagaaagtgggaataaaataagtcacaaagggaaaaaggtgtaattaagaaagcaaaaaggtggaagagacagaacatgtacaagaacagaaagcagtgattcaaagagcaaagaggggaggtagaaaatagaagaggaaaaggctagaactaaaaggaataaaggtagaaagaagatagctgggtgcctgcgggaaaattgaaggtgtcataaaatcaatggtggttgggaatagagaaaaaagtgctcatttacagccataggcactaaatactcacaaaaactcattttgttggaaaggagaagtccctgctatgtaaatagaccttttcaagtagcagagaccagctatgaggcaaaacataattgattagttgaatttaactggatggtgataaggtgtcttcatgattgataatctggtgtgtagttgggttaactttggccccgcaaggtctttgtatcatgtaagggaggctgttttaagctgttaggtatcaggtgaggggatttattaccactgagaccgtaattccatgatgttccttcatgacctggaaacattcctgggggatcattccatgatgttccttcatgacctggaaacattcctgagggatcatttagctctagctgcaaaggtaggagtccaggactgctgagaactgcttcatactttctaaggtctgcattcttcattgctatgttaagtaattctgaagagtaccagaattttcatgccggaaagaatcttgagagttatttattccatacatccttgtttaggggaagaattgcactcacccctttcgaacagatcaggaactttagtttagaaagccagggggattttgattgttcaaaaatttccatggaaatataatttttttttgagacagagtcttgctctgtcacccaggcgggagtgcagtggcgcaatctcggctcactgcaagctctgcctcccaggttcaagccattctcaactttgttattcttaagaattagctgtgaataagaatacatgtaagcttgtcttttttttttaaggcctggtgttttaaagattcttcccatgaaaatctattttgctgaaaatcactaatttctgccttatgtcctgaaggtatgaaatacgaattcaagcgtgcaccaccctgggatgtgcatcaagtgactggacattcatacagacccctgagattgcacctttgatgcaaccccctccacatctggaggtacaaatggctccaggaggattccagccaactgtttctcttttgtggacaggaccgctgcagccaaatggaaaagttttgtattacgaattatacagaagacaaatagcaactcagcctagaaaatccaatccagtcctaatctataacggaagctcaacatcttttatagattccgaactattgcctttcacagagtatgagtatcaggtaagaaatgtgtattataaacaattcgagctgattgtttgcacccgtcagcacctgcctgtaaaaatggtgcacaatttgaaaaggcacttaaagaaatgtaggacttaaggagaataataatattccttaaaaatttttaagtggtaaatgaggaaaaaccatgttcattgcctttttcattttcttggtttttgagccatattatatacgttgtttttcttaagtagattccaggtgaatttgcatttcttattagtaaagtggtttctgccattaagattccctctgtcagcgttgccttggtaggagacactccttatttaaagatcactttgaaaataactcattactcgtaccaaaataaaatcaaatagcaaacatctctagcctcggtgctcaagaaagatacagaatgttgaaaaaagtctagaggaatacaactcacctgcccatggcgatgagttaagttttctctgaggatggcctaaaaaaataagactgcattcttaaaaagccaagaattaagaataatattcagaaaatatggtgaattctgtggaggacttctgttaggtttgttttgttttgccatcagagtccatttgcattcttcttgtgataacaacctcatttcctgtgggagaatgtgcttcccccaccctttgctcaggcgtggtgggagtgtcaatcaatgtgtcaggctgtcttctagccaagtggtgggcacatgagccgctcagcccctcagatttgcctggggcttgatcttcagcagagtgactcagaattttaaaaggtggaggtgagaagtcgtgataaaatatccctaacctcaatctaaaagtttttcttttccctgctatttccaagcatggttcttcaaccgttcttttaattccataaactcacagtaaattctcatttgcttaagtcagaatcagtgcctcttgcttgcagtcaaagaaagcttactgactgatgtaagcacttaagtgccaggaacaatgccaacagaaattttctaaaagaggaaactgagccttaaaaagcttattataacatgaaatactaaaaataataagtcaccaaaaagatagtgaccaaatcaatgagtacagtgaatacagggaacattttaagcatgaaaagaatattttaggacaataatgtatgggacaaattaccgaattaataagatttaaaaatataaataaattctcgaatggtttggaaaaatacacagatataaatccataatcccttgtttgcaattccaagtctaaaaatctcttaaaagtattttcttgctttaccacaagtcatttggcaacaaaacccaatctaaacagacttgagactatttacagtatttatttatcccatttaatatgaatatttatatgttttgctacaaaaatattgctttattataagatggctaatcagatcatggtatggatattacaaaatatacagtatatacattttatcctatttcaaaatctaaaaacaaaattattttaaaacacatcaggcccccaagggtttaggataagaattgtggtttatgtcataaaggaacaaaatacttaccgatgccaccatcggaaacgtaacactgttagaaacagccagaacctacgtgcctgcccttttgttcttttctcattacctttattgagaagtgtcacgttatcaagctgtcagttatctagtctcccttacaaataaaaatggtaccttcgtgagagagctggatgaaatcagcataaaatcttcagccgctaattaaacgcaacttaatgacccatatataagaaacacaaactttctctggtattgtgttgtgtcattgggttaaattctggtcacatgatctgtggaagtctcattccagtttttgtttgtttgtttgtttctttgttcgagacagagtctcgctctgtcacccaggctggagtgcagtggtgagatctcgagatctcaactcactgcaacctctgtctgccaggttcaaacgattctcctgccttagcctccagtgtagctgagattacaggcatgcaccaccacaccaggctaatgtttttttgtatttttagtagagacagggttttgccatattggccaggctgatgttgaacccctgacctcaagtgatcagcctgccttgacctcccaaaatgctgggattacaggcatgagccaccatgccaggccccatcccagttttctatggaatggaaagctccaagcatgtgccttgtctctagtcagatttttcatcaggcactaaggatgactaagaacaaagggacccacatttcagaggagaggcaagttaagaaccttaggctgtgtggtttcttttgtaactgttactatcggctctgtgttacactcctcctccatactcatctcactcaaatgaaagtatttaatttggtttttgatctccaatttttatttattagctaatcccacgtagttacaacataaggatagaaaacaaagaaaatcaaaatctagcttagcccaaaggcccagttcttatggaaaataatattttgaaaagcatagattaaatgctgaaataaatgatcagaaaatattagtttcatttagcctgtgtaaatattgagtctatgtggaccctgagtaatcttacagaagtcatttaggaagttatatactaaaacaatttatttttctttaacaaaagagcatttttgtatttgtgatgaatttgcattgctctcaaaaccacttgagggttacttcatctgcaagtggcctttgaaaataccttcattgtcctatataaatctgctcacccagcaactgacagtgatttcacccttctgcagaggagtgtgtttttgaggtaattgtagattgtagggaataaaaacaaagacctgagaaacttcctagcagtggggaaggattaatcagaagatcgtgaggatgtatagttggggaggttgccacccacatggtgtgccttgcaagtatcagctggggctccccaccaccttcctacactacattacatcattgtactcatttctggttttgagttaaatcattgaaggcagttgttaaaatttagttatgtgaaaagaacaagacagttttcactagtctaaatcaactcattccatcagttggccagtgatagaagagggtatcgcatggataagttcttttgtttttctttcttcttttttttttccttcttctttgtttttttccttcttcttctttttctgagacacagtctcgctctgtcacccaggctggagtgcaatggcacgatcttggctcactgtaacctccgcctcccgggtttaagcaattctctgcctcagcctcctggtagctgggattacaggcgcccgccaccatgcgtggcgaattttttttgtatttttagtagagacggggtttcatcatcttggccaggctagtcttgaactcctaacttcgtgatccacccacctcggcctcctaaagtgatggatgagttctaacgggcaggagggtcaggaaatatctggagaaatggatacttatagagagggaggagctactcactgcagaaaaccaaagagggaaattaaatgagcagcaaatgtcactcacctcaccacaattcatataaccagcttgataactagctcctttgaaggtgagcaaaatccatgtgatatcacaagcaccttctaagtgttcactaatacttcaatatggaatgccctaaaggtagcatccccactgtttacagtacaagtggaggacctaagagcttgttcaaagggcagactcctgggtggaatgggaagggaccccagcaaccagtattttttttctttttttgagatggcatgtcactctgtggccatgctggagtgcaatggcgcaatcttggctcactgcaacctccaactccccggttcagtcaattctcctgcctcaccctcccaagtagctgggattacaggcacacaccaccacgcccagctagttttttgtatttttagtagagatggggtttcaccatgttggccaggatggtctcaatctcctgacctcatgatccacccgcctcagcctcccaaagtgctgggattacaggcgtgagccaccgcgcctggcctagcaacctgtacttttaacaagcagcctggatagtccacaacccacttttttttggaaatactgcctcagagggtgagacattgctgctatgctacttaagccttattttcaagcggtgattttctgaatcagtggttctcagctttgtgcattagaatcacctggggaaatttcacaacattctgggtgctgatacccagtccccattcccctgtagttctgattctgggatgggttctggaatccctgcgattcaaaaggttcccaggtgattctcatgtgcagccagagttgagaatcactagcctaaactgtcataaacagcccaaataagtgaagccagctccccacaaatgcctaatttacatgatgatcattgataatagcctattgacgttggtctatcctggctttcctaaagaagggtcctattgttttgatgtgaaactagaaaggagaacagaatatattatctacaaagtccatgtctcagctactcatataatttattttaatcttcctcatggattttatttggattttgttattgttgttttattttcttttgtttcttacttgggaggtccggtctttggtggtaagagtaaagttcaccatcatttaaaacaggggatttttctagtttgagtcatttcagcatagcttccagaattctgggattctgaaggataacactctggaggattagctttaataaagccagtgagatctaaaatatgaatcaaaaaattaggaatattactttttcttgttttccacaagaatgggttggtggctttacagagtgcactgcagggtcccattagaaagcaaacattctctgtgaatttcaaatgcaacttagtttaccaaaatctaattctcaaacaaccctgtgaatgtatgttccatgcataaatgcgatgcatctgtactaaataaaattcttccattgcacagacctcttccttaaacagagatcacagtcttgcttgtgctacagaatatttacaaatccaagaagatttttttaaagacaataatcatttctatcttcaaccctttcaaaattgggctattctaatacatgcagtgtgaacctccaaattctatgtggagcagttcttaactgtttagcagcaaattaagacaatatttttcccacaggctttgagagggacctgggtgtgagtctactctgttaagacattttggtttttacctttggggagtgagctgaggctaatgaatagctctcagtaattgtgcattcatattcatactcttgcttaaggcaaagactcaccacggatttgatagggcccgccaccaccccccctttcactgattcatgctgtcagtgacttaattagttttcctgaaactatctcactttgacagatttttgcggtaagcacccacgcacactcagggtctctgaagcattctggtgcctcatgactgggtgactgagaagcagtaggtcagtcttagaggaaactctgtgactcatggcatggggtctgaacttagggctagtgctgcaggagcccatgcagaatggcagtctgctgctttctaacagaccaacactgcccccaaacaagaggatggaaagaagggctgtggaggagacacagaaggggatcctcactgttgctgccagtggcagctgcctgaagactgccagaggtactgtggaggccttccctgcaccagcccccaccataggctaccaaatcgttggcgatgagttagaagtgggagggagaaaggccaacatcttctactccttctctcactacttctggatatttgagcacattaacctctttgggcctttcctcataatataaattaggcctgctatgatggaatatcatagactgggtggctttaaataacaaatatttatttcccacaattctagaggcgggaaagtacaaggtcaaggcacctgcagattcagtgtctggtgagggccaccttctggcttacagataatggtcttctccttatatccacatataccaggtagaagaacactagtccccttcatgagggctccaccctatgcaacctaataacctcccaaaggcctccataccatcatattcaagattagccttcaacatatgtatttgaaggggacaaaaacagtcagttcatagcactcatctataaaaggaagcaccctccagctctgtattctatgggcagagtagtggtaagctacaggtatataatttttagaaagtctaatcaaactttatcttctcttgattggtttttgtaatctacagtttgtaaaaccctacaaaataaattctcacccaaagcaacagaattttctaatggtatttagctttaagttgtgttgatgcaagtgaatgtatgaaatcagcttcagataataaatggatatatggttattcatcaccaagatggacacatggaaatataattagttgtgtctctcattgaaacctaacatatttattcactaatatattttttaaagtatagctatattataacatatgaatgtaaataaataataaacttatttagttagctacaaataagtctcatttatgttcctgagaaaacccacactatcaaaaagttgtcatgactatttcactacaagtaacagaaagccaatgtaaactaagttaaacagaagggaattgtttctgctctcgcatctgggaagggcattgaaggaatcccttgaaaccaaagaaaagatatgaacaccaggtcctggaaacctgggatgcaggactcggatgatgtaggattcattcattctgtccctccttgccccatctcagcttgtctctgtttggcttcattctgcacactttcaccaggcatctgaggaaatcactcccagattcaagccctttctgtgcatcagttttcttgtctttaaaatgtgaatagatatagcattggactcataggcttgctctgaggttaaatgagttaatatgtgaatgtgcttggaacagcacctcatacatagaaaccacttcgcccatataacaataatgattattattattacccatccaccttagagtggaaagaggactataagtcaaccaatacaggactctgactgatccttttgcactacctgccttcctgtgaaccaagagaacagaggactatgattgagcaggtgtggtcgcagggcccacctcctacaggcagggctgcatgaggtatgcgggaaatgcttccagccagaagcaagaactgccctagcacgctacacacaccaaccacgggaacaagtactccacacctgtgagatattgacaatccttgtgctctttcacattggatgctcacacccttcctgttttccaaatgaagaagctgagttaagatcacatagcttgtgcaagaaagatacttaatttctgataacttcacctttctcatttaaaaaaatgggtgtgttatgagaactaagaaatctgtgtgtctagtaggatgcctgctacttagtaggtccatgcccccatccgatccccccaggatctcactagttaaaagaaggagaaactttcattcaagactgtaaaaaagccaggttaagacatttcttttgtctatatcaacaagtcattgataaaatgttagagtgtaaaaatctcaatcaggagtacagttgcctctaaaggtgtgatactccttccgctaggaagttcaaccctcctcatccttgccatttctcttctcagaaaaagagtaatttacccacatacccatgactaaaattccaaactctgatagtctgactctacttttatgcaattagctacttgctttgtattgcctgttttctattgctgtcacccttaccccatctcttttctatatcacatttagagaaaacatattgaacacattttctgtttagttttggacttgcatttaattaggtattaatctcactaatgtatttccgaccagcatggaggtttttgtctggttaatttctcccacaagaactaagctccccacacccaccccaactcccacagctcaaggttttaaatgatttattgatattgtctgactcaggcagtgtatttattctaaaactttagggcctgagtgcacaggttagactgaaggccactgggacatttccatgtatagaaaactaaagttcgccactaggcccagggcctgatcattttttgcatcgagccttttgttcccacgggagatcatttccacctgtcagtgtgagcacattcaggagcatgctctaattctttttgttcttgttccatctctcatggcaacccttaggactttattctgaagcttctgttgttggcaatcttcatggcgcctttgggacaagttatccatgtgaagatgggttggttctcaccctcttgcagatgcaactcagatttatatttcacttaaggtgatgttgatcttcctgtctctgtgttggaagtttgtttgctgaaaataaaatgttaaacacaacagatgctcttcaactgaatgtagataatatgccattccagcctgccctcatggctcttcagatggccatgaaaacaaaggctcccaaagtcacctaaaacttaggtcctgtaaaaacatctaggaaagggtaagatgtgttttacttattttcctccatcctgtaaattgagtatttaataaactgtccttattaagcacctacaatgttcaaagtgtatacctagttactaggattgaggcaggaggctaaaatccatgcactctccccttcagggacttaaattatagttgataagtcaaataaagatgcccatgaataatgtatccataaaaatatggctaggaacgttgatgtttgcaggatctgagtgatggcaaaacagacccagggaggaagaagcagcttctttatcttcagggacagcacgatttccacaccaaactctaaaggccactcttattctactctctggccagatggttttgtgcaggacaggtggcaccttgatattaaagaggtacttgactaaaatcattccacagagacatgaaggggcaccatttctctgttccttcagtcttacaaaaagaaatccctttctaaatctccatccttatgtttagaagcctctcttagcccacctactgttattggtacccatgtaatggttcaaaatattctccactgtatcaatcgggatctcagcaggaaacatatggcacattcaaagggtatttgaagaaaatttaatgaagaggctatttatggaggtgtgggtagaattaagagaatcaataagggatgttgaagtacccagggagtaggaagagccagaagctgttaccttctaggcctgcagggacaatggaagaaagtgggtcattgagaggaaattcagccttgtcaacatgcagtgccaaagagaggagcaggagaaacaaagaacctgaactctctcttccctttgatcaaaacctaatggaaaggagccagaggagaaaagattccaggtgaggcagtctgatgaagtcagcattccagagtacagaccaagccagagaagggcagaggatggatctggggaaaaaccagctcgtcccccacactcagattgatgctgcttctcaaccagtatataataatgccttcaccagtagaatcctttctgggctagaggatcacctggccagctttggcttgtcaatctatgattattgataaaccactaagtaaatctgaagacttaaggaggattgtacttaagtacttgaaccaacagcttattacctttaaattgtaaataaacatctcaggatatatgaagcaatctaatctgcaggtggaaacaaaaatgttaacacattcaaataagtcagatgccttaaatggtaatttgtaagaacatagttgagacttcttcttgttaattgatttatctgttgatggagctgatcattactaatatgcctataagcatctagaaaactgtacggttctctctttgattcctataggcatatttctaatggaaaccagtaataaaattcttttctctaaagaatccattgaattgctctaattttttcttttgttcatgtttgaggactttttgagaaattttaactaattataaaacaaagtagagaagccatccaattaacaaatttcattgtagagcaatatttttgaaaagccaggcttttatttactctaaccctcaaagctctacagtacagaagtacctggaagaaagatacacagggaggtgtgggctaaattccaaatgctgtggggagttttccaatcttattaatgtgtaacaactaactggaatccaggagtgagttgcacaattgctatctagccccactagatcccccaaactgttaagtcattctctcctgtcttttcacacaaataatgtgatagtaatcactattatttatttagggtttgctgtgtgctaagggctgtgttaagaactgcatgtatattaactaatttaatctcaaacaaccatttgaaataggtgttattactgacactattttacaggtgagaaacatgaagcattgaaaaattagataccatgcccaaggatatagagttgataagttgaaggactcaaattcgaaccttaagattcagtttcaaagactggtttcttaaattctaccccaacagttacctccaaattgcatttgtatgcagctttgggactttcaaaaatcaatgaaatatttataaatgtattcatcccctaccccattcctcagaaatttctagaaacaatattgcatgtaaatcttaaaatagtcctgtgggatagatgttgttatttcttagcatagtcaagaacctgaatgatttagcaagttacctagtcaaaaagcaacagagtcagaactcaagtcctgactttctgaccccaagttcaaggtggctctgctgaactgcagcttcttcaagtcacctctatcaggagcacaaattcctgaccctgtgaagacagaccgattagggttgcagtctaggctacatgaattaccaattctggatcctcagctattaatttaaactcactaaacctcagttttcttatctgtaaaattgagattaaaaaaacaaacaacaacaaaaaaaacttaccccaggaaagttgctgtgaactttaaataagttgactttaaggctagggtattgtcacttacaaaaaaaagtaaaatttaatatataaatacatagaaggtgttcagtatccagcattcctgcaaaatgaaaatcaaataaagtcactctcctactgcaaaccctacttcccccattccataagatgcaaactcctctctagttccatgaggactttcgtggtctcatttttgtccaattctgtcctcatcccattgctttccggcccttactcactaaggtcagccacactggccttcttgaggatctagccttaaggcctttgcacatgcttttcttttccatagaatgctcttccctcagatcttcatctggtactttctgccaattgtttcccagcttgatggtcatctgttgagagaacctcctggataagccaaccattttctgctctatcaccttatgtatatcaccctacaatctcatcatttcctttctagcatatatcctaacctgtttattttatttgtgtttttattgattgcctctcctcaccaggatgttaatgccagccttgttcactgttgtatccccagctcatagaacagcatctggcatatagaaatggctcagtcaatatgtgttgaattcatggatgataaatggtcttacctaatttactatccttcacggagatgttaatcacaattggtgattgtgatcttagcttcttctagcaacttattgtggataaagtatatattttaatgctatatccattagggtatagttattattgcagagaacataatggaatttcaatgcatttacacatgtttgaacaggatgaaatatatgagtagtacttgcttctgtgtaatatgcaatattgctgaaagcatgataagtggcacgagagatggatgtcacgttgtttgtgatagtttcccctgtctcacttttaggctaccctccacagaaaaagccagtccacgcagggctctatgaaaagcccaggacagcaacccacccatgtggaaggtgtgtacaggccttcttttaatggccttatgtaggaagatgtaaagagtttgggcttttatgtcacatatctgtattggaaagccagccttaccacttaccaagttgcataaatttctgtgttcctcagttttctcatgtgtaaagtggggataataataccaaccatataggattgtcgagaggaaaaatgcaaaattagtacatagaatacacttacaaaagtgtaagtgctcaataaaccccaaaactacttttacatatcctccatgagagtcggatgggggtgggttcctgtttcctcttagggagagcagatataagaaaaaaaaaaaagtatgtgataactccaaattttgattatttagttttattgttaaaagtgaatcagggttgggaggccaaggcgggcggatcacgaggtcaggagatcgagaccatcctggctaagatggtgaaacaccgtctctactaaaaatacaaaaaaattagccgggcggggtggcgtgcgcctgtagtcccaggctactcgggaggctgaggcaggagaatagtgtgaacctgggaggcggagcttgcagtcagccgagatcacgccactgcactccagcctgggcaacagagagagagagactctgtctcaaaaaaaaaaaaaaaaaaaatcagggcaaatttcagtatttcacagtgttaggtcagtttttccttcttcaggtattagaggagaaccatattcacaagtattaaatggctccaaagagcaaggcggtatgagaagcagtagcgacaagacacccaattctagcatgggaaatgtcttgttatttttccagtagcttcacgtctctgaacttcaaaagtgctcatggaaagcaagacaatgtcctgctgtaccctcttcccctgggtcccagaattcaattaaaatcacgttctatcttgcctaatccaaagtgttttagatgaagggaacctggaaaacgggactatatctgtaaaagtgtgactgtattgtatccagcaaggttctatgcagatagagatgctggaaaacatccatttgatggtgaaagaaaatcagatagatagacagttaaataaatagctcctagagcttttcagcacattattccttcataactggagcctgcagggctactcatgaaataaaacaatcttgtaatcatgtaatttcaaattcattgcattgtcttttttgccaacattctttaaccgcgattccagcaaagaagatttcagcatattgctattcaaacatattcaaaacctatgacaagctaccctttaagaaggcattagcgtgagtgccatgggaaaatgtactccaaggttgtagatgaattgatatgatctccttgattgtatctttttatttatgaggcataatttctgagcactggaaagcaaactgcaatgagtgatgactaacaacaaccaaagtcataaatcagcagcagtgaaagaagtagtgattttgatcgaatctattgaattagctgttggccttagccaatacaggtattggaaagacctttttaatatctatttgtccccctcatgggaatgtgataacaatctcattacatgcccctaggaaacaaataatttaattgtttgcccgttaacatacaacctgtttacttattaattactggcatagctgttcatgctagattttttgtttatttctgatgtgaattgttacaaaattatgttcacattccttagtttttataaacaattatgtctccttagagcttcttgatataaatttgtcctcagaattgttgaaatgctttttttaatcaaatattgtcattatcccacaaggaagtatgttacagagtttcacagaagttgcagagagctcagatattcttccctctcttaatctctgacagttaacacttttactaatacaactcttgtaataagcagcctggataaagaacaaaaatctcaaattgctccaagcgtaaagacagtcatcatcacttacattaggagttaacagattagagatcttttgtaaaagattaatcggctgaatttggttactcctgtattacaattttatgaggagaataatagcaaatgtaagaccaaatagacatcagcttggtgctgacccatatacaaaccatccataaaccatatattatgaagtatgttcccttgatttgaacaagacttgtagcattgccttggccaaaagaatcataaaatattttcacaatttaggggtttttcttatgataccataaaggaaaaatgcatcaggaacccccttgaaatgtacattaataacttagctttgctgtaagacaatacttggaaaacatcagtcctaaggaaggttatttcagaaagatatgagacattgagcgaggcaaagcattaaggtgaaaactactttgtttagccaatacaggcattagaaagacctttttaatatctatttgtcccccttatgggaatgtgataacaatcttaacaagttaagtgtggaaattgtgctaaaaaataactagcacaggccgggcgcggtggcttacgcctataatcccagcactttgtgaggcggaggtgggcagatcactaggtcaggagtttgagaccagcctggacaacatggtgaaaccccatctctactaaactacaaaaaattagccaggtgtggtggcaggcacctgtagtcccagctactcaggaggctaaggcaggggaatcacttgaacccaggaggtggagatcgcagtgagtcgagatcgcgccactccattccagcgttggtgaaagagcgagactctgtctcaaagaaaaaaaaaaaaaaaaaaaaaaaagaataactagcacagtaacagaagcatccaaagggtcaccattcttggagatttctgatacatttccccttctcccatcctgtgcagactgatggtcccttctctttcccattcacaaaaattattacaatgcttctgttcacaaatgtttgcttttctcctagaataaaattaggaggagaaatgttgggttgagagaaattgggagcatttagaataatgttactctgcactgagagaaaaatagactcagcaatttctagaaatatcaaggtttcaagaaattactccttaagtgaaaattaggaggcaagaagtggttctacaaagtcagtaaactctagttctgtttggaactgtgaaaaaacacagtaattaactctatgatgattattgaattgtgacatattccaagatacatttattgtgtttatttgaatgactaaagttaatgtgaagtataactctaaagagacataacaaatagaaattgaaaatgtacagtgcctatattctgtacctggctctataaagaataggcctttgtatttttcaaataatattgggtgtaaaaagcgcttggaaatatgttgaaagggcagagtccaaggtcttctcaccagaaattctgatacaggtacccaaaatcattttgatgaccatggctaaggaatatattgtgacaaagacttctcttaaaagaagatttctaagaggcaattttcaagagagaacaaatgattaaattcattgttttcacagcaatgtgattatggcagcttagtggcagatgttgacactccatgtaattaaaaatttttaaggcaaaatacaataattagtcctttggggtaggaaagagtaaataaaagaacaatttcatttttttaatgaacaacaagcataaatatggtaatagtctctagttagatttaaaaatatattacattgaaaacagaaattccattgaaaactgacatattaatctatcattttgctagttaattacagaatttgtggctaaacaattttagtttttatgcttattaaaagtagttaatctatgttttctatgacattttacattgtaactttcttcatggttacaacagaaaccttagagaaataaatcaacaagtcagtcagtcctaacttttcattattaacgactagggaagtttctgactctacaatcataactgtgtgtgcacccactcattcacatgtgaaagtgttcaccaaacccaaataataatgtatttcagcagcaactttaatcatctttaatcttttattataaaagaataaatatgttcagtctatgagaacacatggacacagggaggggaacatcagacacagggaggggaacatcacacaccagggcctgtaagagggtggaggctgggggagggatagcattaggagacatacctaatgtaaatgatgagttcatgggtgcagcaaaccaacatggcacatgtatacctatgtaacaaacctgcacgttgttcacgtgtacactagaacttaaagtacaataataaaaaaatatatatatgttcagtctaaacactgtaggaacaaaaatatcctgaataaatcaaagatgaagaacatcttggcttttttttctcttggccatagaatttataagccttacttgcttttcttccccaataataactcttccatttttctaggagaagcccacacactaaagaaagagaaaatacacaactgtttgttcacaagatattttatttattgatttttatatgggttcattgcaactaaaagatcgggacatattgctaaaaagttttctatgtgggatctctgctgcttctttctctaccctataaagacagaatcgaatcttggggcattgtttctcagtgggaatcataagcataacctgttagtatttttaccctgaaccctgaactacacttcaatacttttatctcttgcttagccgggcatagacaaaaatccacagtgatattttagacaaagaacgtttttacctcagcagagacagagacaaagacagagagacagaaggagacagaaaaaatattattcacaggttcttttttccttttctcctagtggtttgatataacagagacactgcctcatcatacaagttttgtgaaattcataatgcttcattatctcagtcagctttctcttcattctgttttcattttcacagtagctcatgtaaataggttgatcctgctttgcataagcatgttgatttatatgaatgctattttgatctcaaattgattgaatactaaaaagaaagtctaggaaaaagagtaatgtattatgaaggactcctgccaaagacaaaatagcctgcatacattccctattagtgatggggaattttgaattgcctggttttcaaagagaatatttccaaggaaatatagcaaaacactataatactgaggcccaagtgtttttaaaatccagggattaaatcacattttggaactagaactccacctagtagaagttcacgtaacacaggaaggctgagatttagtacaatctacgacactaccattaaaaagccttaatagtatttatgattctatatctacattgaaaatgaaagaaaagttaatgttcataagccagagccagaactgtgctgagcacttgctatgaattatgcttatttcatctcattttctttcaacaccctatgcctgcactacttccatctcctattggtgcacagtaattaattggcaagttgttgaatttttcttttattatacctagttgcactttcttcctcattttcctccccatccattgtagcctgaatttaaattctgcctgcgctcaaatcaccaaccaaagttctgctcttggcaaaaaacgtcatatcaatatttgcaccttactttgcattcctttgtcaagaatattgttttaaatcttgtcattcattgtgtaataataggtgtcccccccaccacttcccagaaagatatttgcagtaaaagaggttgttctggggcacagtgaggagacaggaaccctcctcatcagccctgaagtctgacttcttcatgaataacctccacctcccctccctagtgtaagtctgacctcacctatttctgaggggactctgagagcagctgcagttgtattctgatggatggactctaacttccatgaaatctggctctcccattgctagctccttacttccctgtgcttaccaaaacaaacctccctcacctaagacaacttgtacatgtctatccatccttgcaagctaagacaccttaacctaatctagaattgcaggtattcgtctatggacaagtcgtttaattttcatgattctgactattttatttatgcatatggatggcatacagaatcaaaaaccctgctcattgaaacaggcactggagagcagaattcttgtttcagcacttgtaacttttgtcaccttgaacaagatagtgaaattttctgaggctcaatttcctcacctttaaaaggggactagtaatacattctcggctcaccttacaaggtttccattggaaggactaaataagctgacataagttaaagtgctttgtgaaatgtagagtttatacaaatgtgagtgattattatgcaaatgatgagaggatgtatccgagctctaaaaagagcaggtgtatctatgtaagtaggttagttgtctcttttaaaaaatgaggctcctggcaatcctatcagcaaggggctggagatttgcatttgacagcaacctgaaaacaattcaacatcagaaaatttactttcacaaaggaatccggaaaaaaagaaaagtatgaaaaccactgataggagttgacctaactactaaaaatctgtctaatgtttcttctcttgaagatattattgatgcaaaagcaaagtaaacaaaaatgaaactaaactctcactgcaaaatattctcataggttttttctttttttcccccacaaatatctcctattttgaacattctgcatgctttttttttttttcaatactgcatgcctggaatgtgtgtactgtagaatcaaacaagtttttcagatttgtctttaaaagctcgggggcaaatttttagaaaatatataatgtagaagaaacacaatgagaaaaaaatttcctgaagttaggctttcacatgaaagcttactaaggaatactactactcctaaacacgcagacagtcttcttgtattgccatttagatctatcattctgattgatcactgtgtagttggctattattgggcctaatttaaccctatacactcacacatccatctactctgtctattgtacctgacattctacaaattacttactcatgcaaatgacgacctaaggcaaccttttaggatattcgtgtttaattatacaaatggttcttgataaataagattatacatcgttccatatgtttattccctccttgatgaaaggaaatttaattttcatgcagatttggtggggacaatgtttaagaattgctgagttttttgtagtctgcagatccatccagtctgcagaagctgacaaaatcactccacttcccacacagagatgagcagttttttcattaggcttaaatcaacgtgctgcattctgaaatcctaaacggccccctttgtgttcacatggtcaaaggcaaaaggcaaaaaataaaaataaaaaaggaacagcctgctctccttgctctcctgtgtgattacaaggttgcaagatcaaagtttatctcttcctgttgtgtttagttgcttttggttgccaatttcgttttttttcctttcttttttttttttttttcccagccttagggtatcttgcttttgacagtcttgttgatttctctttggaggtctgggcagtgaattctgcaggaaaagcccccagtagctggacatggtgcagaaccgggccagccccaccagaaggtctcagagcccccacgttccatgtgatctcttctacccaagcagtggtcaacatcagtgcccctgggaagcccaacgggatcgtcagtctctacaggctgttctccagcagcgcccatggggctgagacagtggtgagcagcagagctaaaaatccaggactggttgacttttaaaaatcattactatgaaacctttgtttttatgtttttgtttttccctccatctttcttatccttctgttctcagttgctctacggtgaacttagtagcacaaatatccctcagagaagaaaaagtgaaccctgaggaaacatacagaaagtatgtaaactcttagggagagggatgctaaaggtggtattaaagactccacaaacgtaagaaactaagactttaaaggcaatcacactaatttaatttaatttaatttaattagaaaacagatcaaccacttagagtggtggcacatagtaagaagttggcaaatggtaattattggtggtgtaaatgttagtatgaaaacaaaatagagcaaagaatatccttggaatctctattttgacatgcacaaatctctaataatacatggaaaactctcattcctctggtgatttcaagaaagttctaaccctttagaagagagagcagagcagctccatcagcatagccctagctccactgtttgttcgttaacacgtttgaggcacactgggagacaggagagattgctcagggaaatcatctttcacattgtgcgttagccaagccacttcccggaagcgatgctaagaatcaactagaccagttcctgcattatttaaatgaagataccagcagccagcacgatgaagactcttgtctctgtggtatagcttgtgtcactctcaagtttctcatgaataagtggagattataatactttgttcacacaaacattgtatagagattgtgcagatcctggtattacactatgcattatttaggccaatttagggaacaatttgggcaagtgtggagaattcctctgagaccagagtgtcaggtattgaaacacaatttcaacagataacttacatacagggaggcttggattgaatgttaaaggaatattagcatattttctatagggcttcgtactcaataaatatagatgatgtaaatacaatcaacccttgattatccatgcttataaaatgataataaactaaaataatttatatttggagggcattgtatgcattttttaacagctcttcttaatcatatgttctttatgtcaacatgaacattaatttcagtttctgaactcttgttccgaagagtacttattaaaaccacaatgaggttaaaaatttgctcaaaataaaccaaaactttataatcctacaaagatgattgagagaagactatgatattttgtaaaaaccaacaccctcagaggaagagatagactttcaagccctccaatacttatacctgattttaatgtagatctgaaaagattttttgactgagaaattgcatgcaagtaaccatggcagaatatggaccttggtgaatgctgactagacatataattggaaggcagattttgttttttgaaaagacatcactctgagggtcatagactttgatcaacactttgtgtgttccgtgccattttctaatacctttctaaggtaatagataatcgataatattatgccttgtgatttccatcctgctacctcaaacgtctatttaacggttacattatcagatttttcacctatttgtcatacctctctaactgagttggtaattttttgaggataaatgtcatgctaaatgccatgttgtgtctcccagagtgcctggcatggtactccatttgtaggaggtgggatcttggataacattcatcaaacacctttaatgtttgacactgcctttatctagccttccttccttccacagctatccgaaggcatggccacccagcagactctccatggccttcaagccttcactaactactctattggagtagaggcctgcacctgcttcaactgttgcagcaaaggaccgacagctgaactgagaacccatcctgccccaccctcaggactgtcctctccacaaatcgggacgctggcctcaaggacggcctccttccggtggagtccccccatgttccccaatggtgtcattcacaggtaatgggtcaggcagaaggatgaagaaactaacaaggcatgtgtacagacatatgaactcatggtatagcctactctgcacctaggctacaaacctgtatagctacctggcactccccagggaggacttgcttattgaacagatatctatagcaaagtagacaaacaaattgatttgagtggtaatgttacctgcgatgtatttaaatcataaaagcaactaatgatagaaaggagaacaacgaaatgttttacattaaaaagacaatgcaatgtgttcgtattcaatatgctcttcctaatggttatctggaagcattccttctaccagccttcactggaacataagatacctccacagttaaatcagaattgccctgatctaatttaaaatattgtcataaaccactgtttgaaaggaaaaagaagacacttgactcaaaatcatttagaaaaaaaattatttactctaaaaagagaagaaccatttatgtctctcctcttaaaagagggaaatgtcttatctctaccaaaaaggatcactagttgctgggtaaacagcaatgtgtgtgtagatggtgacttctcttatcatttctctggttacatctgctgctcgtttccaatagcattacataaggtgtttctgagagcagtttcctgcaaatggaaattttaaagagcctgtagctctgtgaaaacaaaatgtctcctcacaaaatagaactggttttaaaagagagagttaaactaattccattacccgtcttgactctacgtatccattctcattttagctatgaactccaattccacgtggcttgccctcctgactcagccctcccctgtactcccagccaaatagaaacaaagtacacggggctggggcagaaagccagccttgggggtctccagccctacaccacatacaagctgagagtggtggcacacaacgaggtgggcagtacggcttccgagtggatcagtttcaccacccaaaaagaatgtgagtataagtggctgctaccataagccagagagattggaatgtggtcaggagaagcttgccctgaaactcggagaagccacttttaaaaacagattgagtgggctcaataacactgaatgttactgaagcattgatgaggatgactactgaggaaaaatgcctactggatttaataatatggaagtcaagggaaaatttaagaaggattttcttgtggggatagggtaaaaataaatttaggggaagttaaacgatcaatgggaagaaagaaaatgaacaaacactggtagaccatttttataagaagttttgctactccttttctttgtaaattacatggcataatctctagtatgtccagagagcattgagacatagcactattaggaaaagcaaaagggcaagtgagtgaaggaaagagcaatcaactaattaattgggggcttccttacatttttatataatacagtcacgcatcgcttaacgatggaaatatgttctgagaaatgcatcgttaggcgagtgtcgtgaaaatatcatagaatgtacttgcacagacctacatgttataacctactctgccccataggcatgtgactgtgctgaatactgcaggcaattgtaacacaatggttatttgtgtatctaaacatagaaaaggcacagaaaaaatctgatataaaagataagagggccaggcacagtggctcacgcctgtaatcccagcactttgggaggccaaggcgggtgaatcacctcaggtcaggagttcgagaccagcctgaccaacatggtgaaaccccatctctactaaaaatacaaaaattagccaggcatggtgacacatacctgtaatcccagctactcaggaggcttaagcaggagaatcactttaacccaggaggcagaggttgtagtgagccgagatcacgccactgtactccagcctgggcaacagagcaagactccttctcaaaaaaaaacaaaaaatgtaagagatggtacagggcagctccattataatcttatggaaccaccatcatttctgcagtcttgctcaaaatgtcattatgagatatatgactataacttagattttataaggtatatgctttcattgtttaataatggcaaacacaaaaagtattaagaataataagtgcttatcagaaccaactgcataatttatggagtccagtggaaaatgaaaatatggaatcctttgctgaaaaatctttaagaattccaagacagtaacagtacagcatcaggctaagtccaagactcttctatgtcacaggcccttgcaacagcacaggtcacatgccaaggaagctggtccagcttattataccccaacccagaggcaaccactactaatattttggcataatcaattcttttaatctcctttctatgggtaatttttactatatggctgaaatactataactaaaatttcatagtcagctttttatacttgacgttattgtatttgcatttcccgtggcattaaaaaaactctttagccaccaattttaatggctatacaatattccatatataaattaattgggacattttgttttttttttaatttcccattaataaatatgatgaaaaaatctttgtgaacagatctttgaatgtctggttatcttcttaaattaaattttgacaaatagaatttgctattaatacatcaagtattttaatattttaaggctttggatactagtttcatgtttgctttcaagaaagattatgtcagattataaatcttacctaaaatactctatctggcattgaatatgatgccaattttaaaagcaagaattacgcattcataaagaccaatgtctcacacaaggagcttaatgtgtctgagcaacaacatggtaggatgttagtaacagatcacatttacagaggacttgtttgttcctggcagtattttagcattttacaaataattcttacaacagacctattattatccaaatttacagatgaaaaaactgaggcagaactataaactgtgtactgcgattccaggatgccattcatatagactatgatctgaactgaggctcttggagttagacagtgacgtggccctaaactaaggccagagcttaagtaacctggccagtttccacatctagtaagtgcagtaattactctgaactcatggtcactgagctcagctgctgtctcagtactactctttccctgatcaattcatttcctactctctgtaatcaagacttcaaaccatctccaccttcgccaaacctccctctgccgctcaccctttctcccttcatgcccacaacccagctcacccatttctccctttattctctgcagaactccttgtcttgtaattttccaggaaaagagatgtcttcagtcagtaatttgctccacttcccactgcagacaaagctacctgcatataccccattgctgtcagtgacaaggaaagggtggtccttcttccgtctgaaataaacctgccttccatgcagtgaacttcatccacttcattactcaccatcccttctctctccttaatctttctgtgtatctcactttgattcaaagttccttctacccttctaatgttaaagcaaacaagctcctcttcccctgcagtgatgtggactctactctctctgacagcaaaactttcctgaggaacggtctgcagatgctttgcccatatcctctcttccacttactctttaacttcctcagcactggatgaaaatccctttctaagtttgcctttggcctccatactgatatatccagaaggcatgtttctccaggagtcaccttcactgactttccagtagcattcaacgcaactgaactttcaatgttcaatccttttttaaaaagtggtttaccctcattttcattaccaccctctcctggtttctcctctacttctttggattttcatttttagtcaactttgttggttgatcttcttccgctgcccaaatcttaatcctaaacattttaactttgtccccttgccgtttctctactccctcctttcctcctccctcatcaggtgagttcatctgctccaaggctttggttccaaaagccaaactccagtggtcacctcctagtcaagtgctctgttttgaagtgtatacccctccacccagattcctcacagacatctccctctgaatttctcataaccagcttacattggacaggccccagacagagcttgcaactttccccttcaagctatgcttcctttagtcctcactttctccattttcatctccagcactgggcacagtatcttagattccaatcaatgttgtttaatgaataagcgagtgcacctaacactgcatgtttattgttgacactgctcaatcagcattttttgtcacccatactatattcaaagcaaactgtaatgattcttaatgtgtgctgtctgattttgtaatctcctttgcactacatccagaagccaattttgctaaatgttgcagttttttggttgatgtggccagaaagccagagaacagctaggtgagctttgtaatttataaccaattcccttttgagtcatgaagcttagcttttgccagaattttttttttcttatgcttggaagaacaaagtgaactgatttaagattttcttcctgtggccaggcacactggctcacacttgtaatcccagcgctttgggaagccaatgggggaggattgcttgaggctaagagttcacgaccagcctgggcaacatatcaagacacctatctctacaaaaattttttttttaaatagccaggtatggtgacatgcgcctgtagtcccagctactcagaagactgaggcaggaggattgcttgagtcctggaagtcaaggctgcagtgagctgtgatcatgtcactgcactccaaccttggcaacagagcaagacttggtctttaagaaaaaaaaaaaaaggattttatctatttgtgtttttttatattggagaagcagcttaaacctggactagcaccataggagaagaggttcccttaatccactactgggtcaatagttacggaaaaatacaagaaatgactatgatacaggttctaaaataccacttatgctacttttaactcattataaatactgggagcacgaaaacatgcaccagagaatacaaaccagaaaataatttggggcctggtgtggtgtctcacgcctgtaatctcagcactttgggaggcagaggtgggcagatcacttgacgtcaggagtttgagacgagcctggccagcatggtgaaaccccatctctactaaaaatccaaaaaaattagctgagtgtggtggcacacacctgtaatctcagctacttgggaggccgagtagtgagaatcacttgaacctgggaggcggaggttgcagtgagccgagatagcgccactgcactctagcctgggcaacagagcaagagtccaactcaaaatagtaaccataataatttaaaaatagaatatgcagttttatatagatgtgatcacatgtacactcagcaacgggtctggagaagaagcctaacaacacatttagttccctctgcttgaatcccccttcagtggagagagaggtgaggtgtaaatgtttaacagctggcctgcttgagggaaaaatggcctgatttgaagtgcttatcagtttccatggtgtgaatacccccattactgctctcaagtgaccaacatgacagcactgaacagagttaggaagggatgggttgtagcgtatcattatataatatttccaccagccagatagagtggatgtaaatgacctcgagcacacagacggtagtaaaatgtagtgaaacaaataaaaagttatgaatttggagtatttataagctttgttttaatataatttatttaagtttatataatttaatttttagtagtggccggatttaacaatgactcacaaaattcctgaatatttaacagttggggtgagccaacttcagcacaccactggagagcacccatagggtgaattggtaaattctgttcttttcaacaaatgtgtaccgatgataacaaagtagcatgggccttatttaagcaagcctaggttcagctccttggtctcctaccagccactgacatagagcaagatatttgacctctctgaacctgagttttctcaccccaaaaattaggaatcaatctttacaggattattttgaggattaaatgagataaagtatgtcaaaagctaggagcgtagtggtacttacagctttttcagtcttccttggggaggatttgtaaactcattattctcgattattttaattgcttactctttttcctcaggaaggtctccaaaccctacaggacaaataagactcctatctttctattttcttgctagttacaagctgtttctttatctgtgctgttatgatatagggaaaaagtgaaaatctactgaactaaggtgatggagagaagtcatagacaaataacaatagagtattccttgtgatatcaggcagaatcaatgttggaaaagcattgagatttaaagagggcttgataactcttgttttggtgtttgcagaaaatttttcttatggctttatgaaaatatcttattttgaaagataacaatcaactgtgtctttacggttgaatattacaattacaaaagcataattattccttattttgttatatttcctaacatcagaaatagatggattgatttttaaagaaaaagaatcagattcaatttagtctcactactcactcctttcttttcttaaaagccaatttggtatataggtgaatcttaatgtttttacaaatatattgattattttgtagaaaataagatctcatgaaataaatctcttctgacttgacaagatgacatggtatcccttcatttgtttccacaaaaattattcatttaaaaggtgagccccagttaaggattttctttttgttttagtaaggaactgaaaaatcaagagaatgtgcctgtgaaatgcacacaaagttgcttctatatgtgatataatacttaggacacctgagcttgattatatactaatgtactatgctattgattgattagtcagggccatgaattattatacttgaattactgtttgcaaggctttttaactatcttagaaaacaaactaacagtttgagaaaaagctttaacaataaatgggtgccaaaaggacgtaattcaccatctaagcagtttggtttggagaaaaaaatatattaacttcatctagtccttggggctttgtggcaataaatattgatttgatatgaaaaatagctatctactgtacttaatagtattaaggatactttacctgttaaaaagagggaaaatgcaacaaaatatgagctccagggttatgctggtgagcagatccattgtatgttaatagttttatttataaaacaccactctctatcgattttttttaaagcaggcataaagttgctgagaaagcatttcacacatgttcccattggttttcttttcacccctgatactggttgtttcgtaatactgaggaaaaagtgaaggattctagcaatgttggttttcttttttttttttttttttgtttggattggttcggtttgattttgctcatattttttttttttaaagtgcacacctgcactccttcaaagaggttaccctttttagaacatacaactttctccccacagtgcctcagtaccgagccccattttcggtggacagcaatttgtctgtggtgtgtgtgaactggagtgacaccttcctcctgaacggccaactgaaggagtacgtgttaaccgacggagggcgacgcgtgtacagcggcttggacaccaccctctacataccgagaacggcggacaaaagttagtttctgactcctgtttctcagtgtggaaggcgctctgttccccagctttacgggatgctaaatctgaaagctgaccagcagatgctcaccattaaaatgtcttggtttaagtgcccccttcttgtgaaaaagttactgctcaggataaataaggttttctttccttcccatttgcagcttgacagcactgcagttataatgcagttcaaggggacagcgctgcctccacaggactggagggtccccaggaagggataagacccaagggccagttgggttcacaaaagaaatagcacccatacatagtcaatgactaccctaaaataatacacttctagcaacttcatagattttcttgctgtatctccagtctccaaacagagccctatcaggaaataactatctccaactcatgaggacctgaataaggggtttccttaaccttccttgatatcagcccctgaaagaacaatcttgaccctctaaaatggagttccttcttcctgtttacttacatgtcccttttctccttgccttgtttttaaattgaaatgagaaaatgctttacaaggtgctaagtattttatagtgatcagcatgctcacaggaccaatgttcactatataatgaattgattaatgagtattttattttggctgtaaggtagaggtaaacagtgagctccagcattgcatgtatagtaatagaaacttaataacatttttacaaagattcagctacacatgttcattgttacagttcatggtcacctgggcagctctttgggaaaggaaggtggcctgatggttgggagacacaggttctacctggccaggcctataaccatctgtgtgaccttgcaagggtcacttccctcaggttcctggccattggaagagcaatttagaccatgtgatttctaggatcccttttgagctctcctgttcagtaagaaactctaggtcatttagtggaaagtacacctgtaaattttaaaggaaggatttaaaccgtgtgcagaacaagatgcgctttgtgtattaccctttactcgtctgatgttcttttcctttgctgtataagctctaattttccttagctctattacttatggataggctattattacactaatgatagctttttttcttaaacattttaaaattagaagtaattttgaatattatataaaacgtcataacttgctttggaatcctatttttcatgctatgatgcattgctcttttaaaagcatgtgccctatttgtaggtgttgaatgaacaagtcatttaccagttcttccttttgtctagccttctttttccaggtcatctgcacgactgacgaaggaagtgttaagacgccgttgatccaatatgatacctctactggacttggtaaacaactcatattatacttggcgtagcacctattcatcttcctcaagaaacacacatatgtttgtttatacatacttggagtcctaatatattagcatagactatacagaagaaattgtgccaagtgttgtcagagtttttttttttgttttttttttgttgttgtttttttttgagacggagtcttgctctgtcactcaggctggagtgcagtggtgcaatcttggctcactgaaacctccacctcctgggttcaagcgattctcctgcctcagcctcccgagtagctgggattacaggcacgggccaccacacctggctaactttttgtatttttagtagagacatggtttcaccttgttagccaggctggtctggatctcctgacctcgtgatctgcctgccttggcctcccaaagtgctaggattacaggcatgagccactgtgcccagccagaaattttttaaaaagtcctcatggaacttatatcaggcaaggagttacaatacactctttttttttttttttttttgagacagagtcttactctgttgcccaggctggagtgcagtggtgcaatctcagctcactgcagcctctagctccaggttcaagcgattctcctgcctcagcctcctgagtagctgggactacaagtgtatgtcaccacgcctggctgattcttgtatttacagtagagatggggtttcactttgttggccagggaggtctcgaactcctgaccacaggtgatccacccaccttggcctcccaaagtgttggaattacaggcgtgagccactgcacctggccagaatgtactcttaaaatgccaaatattgaattgtaaatatggaaaagaccagagagctcaaactaaatttttctcctaaccacaaaccctgtcaataaagaattgtatgacttcgcgtgcataaaggtgatttacagaggaagttagaggagagatcagaagaagaaagaaaatattcagccaattcatgttgatcataatgttaatattctagattcaaagcctagaatgataaatttggaaagtgtcttttattctccataaaagattatgattgactgttgatatcgggtaatttagctcaacgggtacaattttaatttttaaggagcatcttttaaactgagttttactcatagtctctgaatctaaatttgtgatactttataaaagcaaattagagaaatgccaaatcttttccactaaaacagattcgggattgatatcctattttaaattccagtaattaatgatatatcaaatttgcatgtatagagtttttttttgaaaaataaacatgtccaaaatttctgaaacacaatttaaaaaaaaaattttttttaatttttttgagacagagtctcatacatgatgaaacatgtatattattgtcaaggatagtttcaatttgtaaaaataacgtattattctatgtttccaaactttacatgtctggatgtcatataaaatttcctacaacacttaattcttctcatacggcttatttcatttaatagcagtggtaggatagaacagatctcatttagtattctgttagcaactccaatatttccccaagtggacaagtggaggtataagggacacaggaatttatccaggaatgctctgctagcttgttactgggatgagaacaccaacacagattttctattgacttctggcctgggactttttctttgcaatggtttgccaagttaagtacgcataggaatcacctcatgtgcttgtttattgtagtttcccgggcctctggcagagattcagactcaaggaggctcagaatctgctctttaaataagtcctgtccagtgattctgacacagggctcagaaccacgtgttgagtgatgccggaaaaccaaggttgctcgccttctaagccctgccagtctagtttccttggtgaatgggaagtgtgttgttcctggaggcaggccatcaacagagacggatttactctgacactggctgtggtttcggttttctttggatctgaggcccagccaccagagtttcaaaccctgacagtgaacctcccatgtgatgcacaggtagagtcccttaaggtgaaggggtacttcaaaaagacagaagggaagggataaagggacaccatcctgatctcgaggtcttcataaaaaggagaaatcccccgttggctcatgaatacgaattgaggtttccactgtgtctggaggccgggctttgggtagagcagaggggaagaactctgaggattgtgcaatgctctggcagattccaagatgtgctgcccaactaatatccatcgtcagttctaattttcatgatgtaacttttttaaaaacattcctgttcccttgcctgaaggcagcctccaagcaggagagtggcagagacctcattttcctctgactgttctaagggctatttcccttttgaggcttccctcgggcaggctgccctcccttcccctgcgtgctgtggagcaaggggcccactgggcccatcagatcagtttctggagttacagccaacaagttgttttctctctgtgccacacacagaggaaacaactcttttagtgtgcaacctaggctggtttgtttttaatcaaacaacacacattggttcctaattaggggaatttcgacctgctggagcttgattggagtgttgactcaaccctttattttagagatgagaagcaaaggtcagagtccaacatttaatcacagagctgatcggcagcagagttagggttggcaaagtaatatccctcctcttacggagttcaaagtttagttttagtcaccatctgttcctgcctttaatagtttcaccccagttctgaacttttttcctttaagtctttccctgctagtgtgagtgtgaagtaccacgcaggcccatggagttctagaggtgttgaaaagggggagatttgtccagtgagtgagtgggctttgcagttgtgtctgcttgttcttctgacctggctgtgggtattagatttagatgagcagctctctggctcacatctccacaccagcctgtgtggccgctgcatcagatccacaggtttctgtgctggccccagcagtggctggatgggagcagatctctggccaccccacccccacccctgccgcacccctgcttagcttgccaagctgacaacataatttcactgccttcgcctatcctgcatgattcttgtcagcctctctcctatcttccccacaagacttaataaacctgcctggctgggtgcggcggctcatgcctgtaatcccagcatgttggaaggccgaggcaggcggatcatgaggtcgtgagattgagaccatcctggccaacatggtgaaaccccatctctactaaaaatacaaaaattagccaggcatagtggcgcacacctgtaatcccagctacttgggaggctgaggcaggagaatcacttgaacccaagaggcagaggttgcagtgagcggagatcacaccactgcactccaacctgggtgacagagcaagactccatctcaaaaaataaataaataaataaataaataaataaataaataaaaataatcctacccacccttcatccctgtaaagctctaagcataggacctggcaccaggtacattcttgttaaatgtgagctacttttattaatactaacttcatgtgcagagactcacaccaactgaactctcaatgtgtgaacgccaagcaaaggtaagtggctccagtgctaaaagatttctttccataggaagctttcccagtgcatttgggtgatggtttgctgagctttgctctttaacagagaggccatgtaaagacaacatggtagcaaacacaggctgttaatatcataatggaaaatggaatctgatgcttcaaaatccagtttgcacgaagtatcaggaattggactgttgcatgaagcaagtacacctcagatctccaaggagtgattttgtttgtgactctgcagcaataatagtaagggtcccagtccctcatgagaatccaagcaaggactttgctcccaagacacacagctatgaaacaggtgaccctcaaggttactttggtaacctcttttaaaaattgctccccacactcccatctttcccagggatttgtcaagacagtggtgatttccaacctgagcagcagcgccagaagtgtcagcaaggcctctcaagggctgtaagcatctcgttataacccagcaacctgctgaaccattaccccaggctgcacacaagtgcaaacaagcagtaagagacaaactgctttctgctttcaactcctctctaatttactatcaaatagcagggccagagatgacaaaaatgctttctgaaataacatttcccctttctttctctgggttttgcaggcttggtcctaacaactcctgggaaaaagaagggatcgcggagcaaaagcacagagttctacagcgagctgtggttcatagtgttaatggcgatgctgggcttgatcttgttggccatttttctgtccctgatactacaaagaaaaatccacaaagagccatatatcagagaaagacctcccttggtacctcttcagaagaggatgtctccattgaatgtttacccaccgggggaaaaccatatggtatgtttgtagaggtgtggccccatttccctatcactggactagaatacttgttttccttctgagaaaaatgtgtcatagccatggtaacaaggaattagatgtaagttatgtttcactaagtgtggggaccaagagaggctaaccctagaacagctttctcaactttggctgcacattagaatcacctggaaagctttaaaaaatatcactgcctggacttcatccgagaaattctcatatccttggtcttgagtagggcctgaagattggtattcttttcttcactccaaaactgattttaatgtgtaactagggatgagtatctctgccctgtaattgtaagccagggcctggtggagaagagttgtatgttgagattacctggggaaattataggttgtattactgtgtaatttggtggcggggaatgaacattaaaaggcggagatggggaggaaggggctacagtgctagtggtgctcggtctgtcctctggtcctgacaccctgtgccacagaggatggatggctcctcttagctatagaccactcactcccaaaataggaggtccagtaaaggtctagtgggagagggccccatcacttggtattacaggacagtcattgcccagagcactcattgaagggtaaaaggtgatttaattccatggtgcagtctggtgtggggctatgtctacctggaggaggaaaggctgcgttttctaatcctcatcaggtacccatctgttcaccaaagctgggcgcccacagggctacgtctccctgaggaggtgccttttttccagtttgcactaaggttctatattagctagtggctaccctaggcagtactaaaattaagcacagaagcctggtcaagctgcttacacttcaacatttaaaaaaacagcagtgagtgaacacagcagcaccatctgccttccagatctcttcacttttccagcactcagcaatgaatgaccactggttaagccccaacatagctggatcagacctaagtagcaggagtgttgggagcacaaaagggcagtgggccctccgaggtccacggtttgtggtttttgtgggaagtagcaatgggacaatgacgtggtggtggagaagcaaagaaggcactgcccaacaccatcagggccttggctctctactcacatctgtcccactcctctactcactcatcctcctcggagcctccttcctccctgagcccatcagacaagctctaaccacagggccattactgctgctgctccttgggtggctcacactcttgcttcattcacatctctgcacaaatgtcacctcccattctatgtaaaatttcctagccccttaacccacttcttttcttttctatagcatttaccacataacactaagtcagatatgtttgtctgactcctgaaatagaaggtaagctcccaggatcaatgatcttgtgggcctcttcctgttgtatgtgccccgggacccagaacggtgcctggcatatcataggcactccacgaatgtttgttgaatgaatgaatgtcgagtgatcacttcgaaccatgggctgtttgctcctgttcagtgaatagtcattaggagattctcactgaagagcagatatttcaaaatttttccttgttaaagaataactttctttaaggagcccatgttcctagaaggtgcactgctgctggaggaaggcagtggaagagagaaaagaaggcaggagagatctgtttagcctgggagatgagctaaactgaaactagggtctatggagtgcatggagtggtgaaagggaggttcccaagcactgctaggcacatctactgtataatgtgaggtgcggttacaggaaagtgtacccacataccagcaatgtccagaagtcatttcagtgatactttctcctgtcctttgacccagtccctataggcaggcacctctgtgtcagaatcctccatgaggaagaacactgtcttccttacttggttaacttagtgaccagaagacactcccatcattcttgtggagatgttatgttactctggatataaccccattgctcagggttttaatgagtcttgttaagcttcgttttgtcaaagtgaggaccatgaactatctgcatcagcatcacataggaggagcaggacctgaagttctgagggagaaactcaataatctgccattttaaccagaacctcaagaagtctgggccaggctcggtggctcacacctgtaatcccagcactttgggaggttgaggcaggagaatggtgtgaacccaggaggcagagcttgcagtgaaccgagatcacgccactgtactccagcctggacaacagagcgagactccgtcacaaaacaaaacaaaacaaaacaaaacaaaaaaagaagtctgatgcacagcaagatttgagaacagctgaaaatgaaataataatataatacaaaacctgtatgcagtgtactgtttgataaccagtagaaacaggtggtgggagggtgctggttagaccttgctgtcctgacaccacacaggctaagccgcctctggggacagacttaggcttcagctgagaaaagcggacaaaagaatgtaaacaccctgttcctgcacaccctttaccatcggggaaatgcacagtggcacccaactgattctttcactgagtggccaagactgagtcaggtgtgaggatgggaaggcatagagggactggctggctgccaggggctctgggcccagggaactggctcatcctcagcagggaagccattcattgcaggcaggtctcagcagaagtgaaatctgggatacaccagggcaccgggtggaattcccctgagcctgttgaatcataatttaatcctatccagttgacagtgtatttgcaagtcttcttctgttgctttttacaaatatttttaaaccaaactgctctcacaaagttggagaccatgagagacattgtcaaaaattagccaaactaaagagagtacaatttgtattagtagagcaaaatgaagtccctgttggtgactgtgggctcctcatctactcaggtgggaaagaatccagtcaaggggaagaatctgaataggaacaagccagattcacctgctcagttttccagattgactgtcttttcacttgagtaggtcaatgagctatgcccctgcaacacccacccacacacacacacacacacacttctccccctcatgtgacaagctctggtttcagtgctgctgtgaccctcttccaagcacccgtcttgtgaacaggtaagataccctttgaacatcagacccaaactggcaaaaggattttaggctatactctgaatggagagaaataggcagaggtgccaaggaatgagagtgtcttttgtatttcatcaacatttttcaagaccatacagtatacagtatagctaagtttaagttttgcttgttatttaattactggtttgaagatcctttcattccctgcaatactaaacaaatactggcagtggtacttaccttagacactaatcaattaatttccactcaccaaggtttttttttttttaatttgtttgtttttgagacagagtcttctgtcatccagactggagtgcagtggcatgatctcgactcactgcaacctccagctcctgggttcaagcgattctcctgcctcagcctcctgagtaactgggactacaggcgcccgccaccatgcctggctaatttttgtatttttagtagagacggggtttcaccatgttggccaggttggtctcgaactcctgacctcaaatgatccacccgtcttggcctcccaaattgctgggattacaggcatgagccaccgcacccggcctcactatgaagttttagttgcaaaacccaactttctctctctcatatatatatatatatatatatatatatatatatatatatatatacacacacacatacacatacatatatattcacatatatatgtatatatacacacacacatatatatacacacacatatatacatatgcaggtatgtatcctaggatatatatgtacatcagagcagtattaaatatgggtatgataatgctgtcattggagaaatgcaaggaatgtgtttaaaactgttccaaacatggactgatgctgccatttgttctcagtttgactctgtggctgatatatctgatgtgtcaagcaatgtcaccctaaaaagttacaccatgcactttgaggtacctctgtgtgctgcatgaatgcatgatcttttgcatggtgtgttgactgcacagtgaaaagcaggaacagatcattgatgacttccatatatccattccttggaaagctgaacaacatgagtgaaaactctactgaaaaaagaaaagaaatgggaggccgaggcgggcggatcacaaggtcaggagatcgagaccatcctggctaacacggtgaaaccccgtctctactaaaaataccaaaaattagccgggcatggtggcgggcgcctgtagtcccagctactcgggaggctgaggcaggagaatggcgtgaacccgggaggcggagcttgcagtgagccgagattgcaccactgcactccagcctgggcgaaagagcaaaactctgtctcaaaaaaaaaaaaaaaaaaaagaaaagaaaagaaaaagcagaaacatttcattgattggaccagctaaatcagagccctcagatatttagagcaactatagtttatcttacggcgcgttctaggtctaaattatgtagtgactttttctctctgatgttaatatcagacctgatgtaatttggaggctggaatcctataagaaatggaggaatatggaatgagaaatgagggagggaggagtcaatttccctacacaaatccaggacttttaaagtgaaagacaaacggagctcacatagtggaccaccatgaaataatattgttatctttggctgttctgggggaggagtgttctcaagagggaggctctgtgctgacatgtatgaagaagataccttgttcacccatcatccgtctgccttgccccaccactttgcaatgcagcaagcccttgccccacagggaacaacagccagagcaccagtgcatgagctctctaggtgccgaaaacactggccacctaacttgagtattagctcatcatctcatccttcttaccaagaaacccagggtcaccgtgttgtgggtgctcatagctgctaaattctgtaggtgacagttgttcccttcattgacaatgtgacaattgtcaggagacagtcattcccttcactgacaatgtgtgagacacaattctctgtcatatttcaagcccatattctttatatgtgaaatactcacagcaacttccttctcaggggttagccgataccaaaattccccggtctgggacacctgtgagtatccgcagcaaccggagtgcatgtgtcctgcgcatcccgagtcaaaaccaaaccagcctaacctactcccagggttctcttcaccgcagcgtcagccagctcatggacattcaagacaagaaagtcttgatggacaactcactgtgggaagccatcatgggccacaacagtggactggtgagttggtttcctcatacagggcctttgctaaatatcccagaaaaaatattggtacagagctgcctgtacttcaccgaatgctgccccatggcactcgcctctgagcacttagccagtgaggtagtaacaaccggtttactaatgttacttcagttgtttgataagcagggtagaaactttgtcttgttcttctggtatgcaatagatgcttaaaaataaatgcttattggctagccgtggtggctcatgcctgtaatcccagcacttggggaggccgaggtgggcggatcacctgaggacaggagtttgagaccagcctggccaacatggtgaaaccctgtctgtactaaaaatacaaaaattagccaggtgtggtggtgggcacctgtaatcccagctactaggggggctgaggcaggagaattgcttgaacccaggaggtggaggttgcagtgagccgagaccgcgccactgcactccagcctgggtgacagagactccatctcaaaataaataaataaataagcagcaaacaggttatacttcatatacttggagcagatgacaggaaacattggaatgggcctaaaacaaggcataaaatacaagcacttgttttactaaaacaaaaaggtactttttttgttttgccttttcctattggtgtatgggtagacgcaaaaagaatattttgtatcaacaggtgaacatggttgctttccaaaaccttaggaaatgatgacaaatgagggtgttactatttataagcttcatctttcataatttcagtccagtgggtacaaatcattggctctttgaaaggtaacctcttcgtgatataacatttattatcagtctctgagcggctacaataacaaaaatcctagaatttttgccaactatcaaatttcattgtgctaacttcctagatgcccgctgcagtacctaccattccactgggcctgttagaaaataaacagataggccaggcacagtggcttacgcctgtaatcccagcattttgggaggccgaggtgggcggatcacgaggtccagagttagatagagaccagcctgaccaacatggtgaaacctcgtctctaccaaaaatacaaaaattagctgggcgcggtggtgcgcacctgtaatcccagctactcaggaggctgaggcaggagaattgcttgaacctgggaggtggaagttgcagtgagctgagatggccccactgcactccagcctgggtgacagagcaagactctgaaaaaagaaaaaaaggaaaaaaggaaggaaggaaggaaggaaagaaggaaggaaggaaggaaagaaggaaggaaggaaggaaggaaggaaggaaggaaggaaggaaggaaggaaggaaggaaggaaggaaggaaggaaggaaggaaggaaggaaggaaggaaagaaggaagggagggagggagggagagaaagaaaagaaaagaaacataaccagctaggaagttagctcctgtgtttactcctctggggtaaaattattcacctccacttctttcaatcatctgcttctgtttttggatttgctctcatctttctcctccaagttctcacttttccttcactgaaaagttgatgacttccatgaagcctttcttgactaatagcaaataataaagggagttcgctggacccaggttccctaacactatataaaaaaatgtaccatccttctggcctgttcagaatgattgtataatatatacatatatataatatgcattttaaaatcacaggctgtttgatgttgttgtaacctcaactacatgagtccatttcagatctaaagtttttaaaaggcagggataattatatttggttgaaacaatgaattgctaactgatcatttttgacatgcaaaacagcaattgctatacattcaacataatacattgaaagttcagatgaattattacatctaatcttcacaaactgtaggaagtaggttctattatcatcctcattttttacaaaaagaactgaggtttagagagatgagtgatttaatgagagattacacagctagcaattatttttatgggtttgggttcttaaaaacatcatctgactacagagctcctatttgtaactattatactgtattgtcatttttgcttgctttttacggtactaataatgggcaatgtgcaaagggactcaataacaagcttttgaaggtgccagtacttggcaagttatctgtttattataacattataaccaacattactaaccctatttgataaatacaaaatacagcacaagagtgggaagaaatggagcacaaatagctagcattctgcctcttccatttaccgtttgaactaaatccatatatatgtgtgtatatatatgtatatatacagatcaccagaggtcaggagttcaagaccagactggccaacatggtgaaaccccatctctactaaaaatactatatacatacatacatacatacatatatatatatagtgtatatatacactaaaatatatagtatatatatgtagtgtctatatagtgtgtatatatatactaaaaatatatatatatacccccagctaatttatttttatcaagtatatatgtacacacacacacatcccactctacagatgagtagactgaggcttctgaggcttaggttaaaatatgacacaatataaccctcaaatcacatatacattttgaattagtctatagttcatgtgtgcatgtgatgtgatcctttcaataagagaaatttaaggcaaggtctgttttagaccccaccatggtgttgagaataaaaaagcctttaatacttattactttttacacttaattgatataactataaattgatagcaaatactattgatagcaagtatgtagccaatgatgattggcttatttttcagtatgtggatgaagaggacctgatgaacgccatcaaggatttcagctcagtgactaaggaacgcaccacattcacagacacccacctgtaaaggatggaaacccagaagacgtaaccctggaatgcaaggtctgcacccatttcctcctgggttatcactcacacatcataaatgctgaaaagccattgtttattatcctataattctttaaagaaatgatgactgtttttgaaagtgttccttcctaatagaggtctaagaaatgatatttttctcatcttaaatgagagagaatattcatatgaaaatacttgatttgctcttattttgtagaagacaaagaagtatgtaattgtcacttggttctgtttggcagtgatgctcctggttaactgaataatcagtggcaatttcaagatggctcacagttgttagaagtagtaagttagttactggctcaaaaatgattctgttgaaaggatgtcactgctgttcatttctatctgccatttctgtcagggttgacacaatcctgcaagaatagttattctaatgatcacagctgctaaatgaatcccaaactttgcaccaggtcgacaaacttttctgaaggttctatttatttaccatacatagggttacttaccaaactttttgacaaggctgaaggttctatttatttacaatacatagggttactcaccaaactttttgacaaggcaacacataacttacacataaatgtctctgttcttgcatttatgaattttccaaaaatctaaggagtaaacagcttatttatacattttgaggagaaaacaaagtgtttcactaggaacacctctacttgaaccaatgtttttatttcatatattttatagttttgaaactagtttctcataaaattctgtcaattcactgaatatcagagaatactgacatcttcaacctagcacatttcaaatggaaactactgttctatttgcaatattaggctgcgtgaaattttaaaaggaaaaatgtatctgttccttctagcattaacatatatacatgtagagacaagactatacctatgtgtatatatatgtatatcatgtatatattactctgcactatatcccttctttttggagaactagccattattttagccacagaatcagtaagaacagatgatatgcaacagtaccaattacggttcaaaaatgtctgtcacctgctctagttggattacaaagtcattggtgaaagtcctatggcaagaaaaattttcttgcaaatcatccacataaaatcagatatttaaatttgttcttcatggaaaacagagtaagaaaacctcttgtcttccttcatccttaaaggtctttgtgaccccaggaaaatattgactctgtctaacacacaatagtcacaatactttttgtgaatctacaaccagagacaggcaaaaacttgtaaagtaagggatagtcttacttattctgcctgaaaacaatgtattaccccagggcccaacagtaaaagattgtggactttttgggtattgagatttcatctagctctgtgagagagcagctcctcagactgaccaactcctagacaaagtttgccaaccataagtgtcaaaagcacaggccagtattaagcagaagttctaccaccttattagaactgctataaacaaaagcatctgaaataattgtgcacatctggcagtgactgtagaaaatacgaaatatatatttctcgccaagtttttatactttctgaaatgaaaacataggattgactagtttactggtttttattcccatatgccgattctgggacaataaagttgtttaaagctggcacaaataagcattaaccaaggctgtgtccaccttctgtgagctacttaaggtatataggaaaggagtggtcacaaacttgcatcctaatccttggtggactcttctaagaatacagtttgctagtcacaaagaatagtctacaaatatgctttgctaggttcagaagattgagtttatcctgatttttgaaaaattaaccaggtatctttatcactgtgtatttttccaagcacagtataaaattttaacaacgcacaaaaaaatacagaactgcaggggattttatcttggatcattatccatttaatcatctaattagacatgaactcagttagctgaatcatttacattttgactccatagcttagggcagacagaagcctgtatggcttctgcccagaactctgtcccctgctacatgtctaagtttacttgtatttatttcagagaagaactctaagatgttgctttgctactttaagtggtattgcgtgccaagcctctattatacaaaccatgcagactcgcctctagagattctgattcggttgatctggggtgtgtggctgaggcatcagtactttttaaagcttccaggtgttctaatgttgagacccactgatgttccacaatctggaagaaatcatgtacaggaataatatgctatgcacagggactatgctccttggctcaccccttctcccttataaacaatgagcagttcttgatgaacctctttaaatttaaatctcctgactcacattttaccaattgtacatgccacattctcagcttacgaactaccatgttttgttattcttaatatcaactgtttggtaagagtacagttgtttttatacactctaagaaatgtgtttataatctactgtaatttccactaaatggaacccaaatattaatgttatggtaccatatactgatgtaaaaatcatgctggcatccatgaacacaccggtaaataaaacatagtccaagtggaagaattcattaataaggaacttttaattatgtcacaaatgaatagttggtttccaatgcacaaatatcatgtaaactaatctaaagatggtttgcttaataaatatttgaatgtgacctaattctggcttaatcatctatttattattaaaaaataatactcttaacagctctgagttacacataaatgatgataaagctatacctatttaagaaagtaagtaggatgttctggataatttctcaaccaacaatgtacattattagaatgaaaactgttttatttttttttccaaaatatactattattatgtctcaaccagcagagattcaaattcagcaggactggagtgggagtgaggcctgggcaaccatgtgtctaacctcagccatttctgatacataagcctgcataagagccaggaacaggaccatagactcttgaaatagaaagatttgggttcagaagttggctcagtaggtaataagccttgtcactaagttagttatttaacccctgtgggtctcagtgatcccatctgtgaaatgaggataacaacaacacttacttacttaccctattggtatgaaaatacttctttccatgaaaataattacaattgttttcatttttcatcatcaatcacacaaagtacacagactcatttcaattttttttcttcccaccacagcgaccctaatgaggtaggtataatgaaaaaattaaggcataatgggggcaatctgagaaattagtgtcagagtagacagacataaaccactgcatcaaggttcaatctcctgtaagcaaaagaaagaaacgatttgacttgtactgtaatgcaatctagtatagtcagtttcctttttatgcgattctattacataatagttactatcttctttttaatggccttttattcctggtcactagagtctagttttttctttcattttcttacttgcccacccaactttcacataactgtcataaagaggaagaagggtgtaagataattacaatcttagtaattttgaaattatgctttgcctaatattttctttcattgataataacttattttccacatatattaagttctccctccccccattttttttaaattatgggaagaagcaaagaaatgaacaaacatatatagcacactttaaacagaactgttacttaaataactgaaaacgcattgacataatcatttttatttgatttaattgataaataaatacaagagaactgttgtgaaaccactggcaatatagtaaattttaaagattttatttcaacttcactcacttatatttcttggaatggggatatatacattattcaccaataaatgctaatgctttaaatttacaattaccctatttgtagaaacctgaagatcattccaattaaatgaaaaaaaattgtacaaaaacgttcttttgctcttacaattcaaaatacattcaaattcacattcttacagcagccaaaacctttaacccaaaattcagaactgcagtcctacaagtgaacaaactagtgttttaatttaattatcatgattgttgttaacactgaaaaaaaaacatggtggctcctgaaacaagacaggttagcaactggtacagctttcccttctgggcactcaaagctttgcccttgattattatttttatttcatcttttcaaacacagacaattgctccaacttgaaagtttcaatggaattttggcatttaatattgctaatgcttgctaagatttaagatctcccaatgatgagaatcagaaaatgacgcacgactaaattaaaatcatcctaaaagacttactacatagtggtatctggtattcaatatcaatagtgtttttgaattacatgatatgtttttcacaaacatagcacctcatcaaatatctggtaaacactttgcaatcacaataagtgttgggagaccaagttccaaagacaattatgtgattcacttaaaggtaacattgtaagacaagtctcaggcataatgaagattaggaatgcagtctgctggttcccatgatctaaagggatgctcacctatatgggcaccatcctattaagacgtggtaata

SEQ ID NO: 783 - skipped

SEQ ID NO: 784 - protein, 134 aa, Homo sapiens; identical to SEQ ID NO: 636

SEQ ID NO: 785 - protein, 184 aa, Homo sapiens; identical to SEQ ID NO: 634

SEQ ID NO: 786 - protein, 200 aa, Homo sapiens
MAFTEHSPLTPHRRDLCSRSIWLARKIRSDLTALTESYVKHQGLNKNINLDSADGMPVASTDQWSELTEAERLQENLQAYRTFHVLLARLLEDQQVHFTPTEGDFHQAIHTLLLQVAAFAYQIEELMILLEYKIPRNEADGMPINVGDGGLFEKKLWGLKVLQELSQWTVRSIHDLRFISSHQTGIPARGSHYIANNKKM

SEQ ID NO: 787 - protein, 211 aa, Homo sapiens
MKLWDVVAVCLVLLHTASAFPLPAGKRPPEAPAEDRSLGRRRAPFALSSDSNMPEDYPDQFDDVMDFIQATIKRLKRSPDKQMAVLPRRERNRQAAAANPENSRGKGRRGQRGKNRGCVLTAIHLNVTDLGLGYETKEELIFRYCSGSCDAAETTYDKILKNLSRNRRLVSDKVGQACCRPIAFDDDLSFLDDNLVYHILRKHSAKRCGCI

SEQ ID NO: 788 - protein, 185 aa, Homo sapiens
MKLWDVVAVCLVLLHTASAFPLPAANMPEDYPDQFDDVMDFIQATIKRLKRSPDKQMAVLPRRERNRQAAAANPENSRGKGRRGQRGKNRGCVLTAIHLNVTDLGLGYETKEELIFRYCSGSCDAAETTYDKILKNLSRNRRLVSDKVGQACCRPIAFDDDLSFLDDNLVYHILRKHSAKRCGCI

SEQ ID NO: 789 - protein, 228 aa, Homo sapiens
MQSLPNSNGAAAGRDFKMKLWDVVAVCLVLLHTASAFPLPAGKRPPEAPAEDRSLGRRRAPFALSSDSNMPEDYPDQFDDVMDFIQATIKRLKRSPDKQMAVLPRRERNRQAAAANPENSRGKGRRGQRGKNRGCVLTAIHLNVTDLGLGYETKEELIFRYCSGSCDAAETTYDKILKNLSRNRRLVSDKVGQACCRPIAFDDDLSFLDDNLVYHILRKHSAKRCGCI

SEQ ID NO: 790 - protein, 202 aa, Homo sapiens
MQSLPNSNGAAAGRDFKMKLWDVVAVCLVLLHTASAFPLPAANMPEDYPDQFDDVMDFIQATIKRLKRSPDKQMAVLPRRERNRQAAAANPENSRGKGRRGQRGKNRGCVLTAIHLNVTDLGLGYETKEELIFRYCSGSCDAAETTYDKILKNLSRNRRLVSDKVGQACCRPIAFDDDLSFLDDNLVYHILRKHSAKRCGCI

SEQ ID NO: 791 - protein, 159 aa, Homo sapiens
MPEDYPDQFDDVMDFIQATIKRLKRSPDKQMAVLPRRERNRQAAAANPENSRGKGRRGQRGKNRGCVLTAIHLNVTDLGLGYETKEELIFRYCSGSCDAAETTYDKILKNLSRNRRLVSDKVGQACCRPIAFDDDLSFLDDNLVYHILRKHSAKRCGCI

SEQ ID NO: 792 - protein, 159 aa, Homo sapiens; identical to SEQ ID NO: 791

SEQ ID NO: 793 - protein, 185 aa, Homo sapiens; identical to SEQ ID NO: 788

SEQ ID NO: 794 - DNA, 20 bp, Artificial Sequence
  Synthetic Polynucleotide
tgctccaggcatgcagatcc

SEQ ID NO: 795 - DNA, 20 bp, Artificial Sequence
  Synthetic Polynucleotide
tagcaccgcccagacgactg

SEQ ID NO: 796 - DNA, 20 bp, Artificial Sequence
  Synthetic Polynucleotide
tgtagcaccgcccagacgac

SEQ ID NO: 797 - DNA, 20 bp, Artificial Sequence
  Synthetic Polynucleotide
tcaccgattttgattctcaa

SEQ ID NO: 798 - DNA, 20 bp, Artificial Sequence
  Synthetic Polynucleotide
tatacacatcagaatcctta

SEQ ID NO: 799 - DNA, 20 bp, Artificial Sequence
  Synthetic Polynucleotide
tgatatacacatcagaatcc

SEQ ID NO: 800 - DNA, 27 bp, Artificial Sequence
  Synthetic Polynucleotide
agtgaccactgccaacagcttcatgtc

SEQ ID NO: 801 - DNA, 26 bp, Artificial Sequence
  Synthetic Polynucleotide
gggtaacagctgaatcaggcccttcg

SEQ ID NO: 802 - DNA, 41 bp, Artificial Sequence
  Synthetic Polynucleotide
gaataagcagtattattaagtagccctgcatttcaggtttc

SEQ ID NO: 803 - DNA, 24 bp, Artificial Sequence
  Synthetic Polynucleotide
cgaaggcaccaaagctgcccttac

SEQ ID NO: 804 - DNA, 20 bp, Artificial Sequence
  Synthetic Polynucleotide
tgctgagcctgcctgtcgtc

SEQ ID NO: 805 - DNA, 20 bp, Artificial Sequence
  Synthetic Polynucleotide
tgtacaccgaggagcccatg

SEQ ID NO: 806 - DNA, 20 bp, Artificial Sequence
  Synthetic Polynucleotide
tgatgtacaccgaggagccc

SEQ ID NO: 807 - DNA, 20 bp, Artificial Sequence
  Synthetic Polynucleotide
tgagcctgcctgtcgtctgt

SEQ ID NO: 808 - DNA, 29 bp, Artificial Sequence
  Synthetic Polynucleotide
cagagtcctctgtgaaaaagcccttggag

SEQ ID NO: 809 - DNA, 27 bp, Artificial Sequence
  Synthetic Polynucleotide
atgcggatggcaatgtagcggtcaatg
